(19) United States
(12) Patent Application Publication
(10) Pub. No.: US 2025/0388913 A1
(43) Pub. Date: Dec. 25, 2025

(54) DNA ASSEMBLY

(71) Applicant: Oxford University Innovation Limited, Oxford (GB)

(72) Inventors: Da LIN, Oxford (Oxfordshire) (GB); Chris O'CALLAGHAN, Oxford (Oxfordshire) (GB)

(21) Appl. No.: 16/610,121

(22) PCT Filed: May 2, 2018
(86) PCT No.: PCT/GB2018/051174

§ 371 Date: Nov. 1, 2019

(30) Foreign Application Priority Data
May 3, 2017 (GB) 1707049.1
Aug. 23, 2017 (GB) 1713546.8

(51) Int. Cl. C12N 15/64; C12N 9/00; C12N 9/16; C12N 15/10; C12N 15/113; C12N 15/66; C12N 15/74

(52) U.S. Cl. CPC C12N 15/64; C12N 9/16; C12N 9/93; C12N 15/10; C12N 15/113; C12N 15/66; C12N 15/74; C12Y 301/21004; C12Y 605/01001

(57) ABSTRACT

The invention relates to a nucleic acid for use in DNA assembly, wherein the nucleic acid comprises at least one methylation-protectable restriction element, the methylation-protectable restriction element comprising: a restriction enzyme recognition sequence that is recognised by a restriction enzyme that cleaves outside of the recognition sequence; and a DNA methylase recognition sequence, wherein the restriction enzyme recognition sequence and the DNA methylase recognition sequence overlap such that the base modified by the DNA methylase lies within the restriction enzyme recognition sequence, wherein the DNA methylase recognition sequence is not identical to or enclosed by the restriction enzyme recognition sequence, and wherein the DNA methylase recognition sequence does not overlap with the sequence that would form the overhang end sequence generated by the restriction enzyme. The invention further relates to asscociated methods and kits.

### CROSS-REFERENCE TO RELATED APPLICATIONS

[0001] This application is the National Stage of International Application No. PCT/GB2018/051174, filed May 2, 2018, which claims the priority to GB 1707049.1, filed May 3, 2017, and GB 1713546.8, filed Aug. 23, 2017, which are entirely incorporated herein by reference.

### SEQUENCE LISTING

[0002] This application contains a sequence listing filed in electronic form as an ASCII.txt file entitled “JDM87541P.WOP_ST25.TXT”, created on May 5, 2017, and having a size of 4.2 Mb. The content of the sequence listing is incorporated herein in its entirety.

### FIELD OF THE DISCLOSURE

[0003] This invention relates to DNA assembly methods, and related nucleic acid material.

### BACKGROUND

[0004] Advances in biology and biotechnology have led to development of a variety of methods for assembly of large DNA constructs. Existing methods could be largely divided into two groups: homology-based methods that utilize long overlapping sequence between fragments to specify the order of assembly, such as Gibson assembly and yeast- or B. subtilis-based in vivo homologous recombination approaches, and restriction enzyme/recombinase-based methods that utilize defined enzyme-specific sequence to specify the order of assembly, such as Moclo (Reviewed in Nat Rev Mol Cell Biol. 2015 September; 16(9):568-76. doi: 10.1038/nrm4014 (PMID 2608161)2 and Crit Rev Biotechnol. 2017 May; 37(3):277-286. doi: 10.3109/07388551.2016.1141394 (PMID 26863154). An ongoing struggle is to achieve a balance between reducing sequence design constraints such as forbidden sequence in assembled DNA and unwanted scar sequence introduced during the assembly process, and improving assembly modularity and part reusability.

[0005] The initial type IIS restriction enzyme-based DNA assembly system was named Golden Gate assembly. In Golden Gate assembly system, insert DNA fragments to be assembled within insert plasmids are flanked by recognition sites for a type IIS restriction enzyme that cuts outside the recognition sequence and generates arbitrary adhesive ends with sequences independent of the enzyme recognition sequence. The insert plasmids for Golden Gate assembly contain inserts flanked by type IIS restriction site within the insert vector backbone facing the inserts, so that once the inserts are released from the plasmid by the type IIS restriction enzyme, they do not contain the restriction site. The assembly vector for Golden Gate assembly contains a negative selection marker flanked by type IIS sites located in the selection marker facing the vector, so that once the selection marker is released from the vector, the vector backbone does not contain the type IIS restriction site. These specially designed plasmids allow simple one-pot assembly of multiple DNA fragments by mixing insert plasmids and vectors together with a type IIS restriction enzyme and DNA ligase. In the Golden Gate assembly reaction, restriction digest of inserts and vector, and ligation between inserts and vector occurs in the same tube. A mixture of ligation products will be generated during the one-pot reaction when inserts and assembly vector backbone have compatible adhesive ends. This includes favorable ligation products among inserts and assembly vector backbone, as well as unfavorable ligation products such as between the negative selection marker and assembly vector backbone, between the negative selection marker and insert vector backbone, and between insert and insert vector backbone. Because the type IIS restriction sites are located within the negative selection marker and the insert vector backbone, all the unfavorable ligation products are susceptible to digestion by the type IIS restriction enzyme, while the favorable ligation products are refractory to digestion. As a result the reaction favors generation of correctly assembled ligation products among inserts and assembly vector backbone in the long term. Followed by selection using positive antibiotic selection markers within the assembly vector backbone and negative selection marker within the assembly vector insert, plasmids containing correctly assembled inserts could be selected with high efficiency.

[0006] Moclo-based systems were developed from the Golden Gate assembly system by adding a second pair type IIS restriction sites different from the enzyme used for assembly to the assembly vector in order to release the assembled DNA for next stage assembly. In Golden Gate assembly, the assembled DNA could not be released by the same restriction enzyme used for assembly, because the inserts and assembly plasmid vector backbone lack recognition sequence of the type IIS restriction enzyme used. By adding a different pair of type IIS restriction sites to release the assembled fragment, the process of Golden Gate assembly could be repeated using this second restriction enzyme and a different vector carrying a different antibiotic selection marker. Alternative sequential uses of two different type IIS restriction enzymes and antibiotic selection markers enable hierarchical assembly of large DNA fragments by one-pot restriction/ligation reaction.

[0007] A major drawback of type IIS enzyme-based DNA assembly is the necessity to remove internal type IIS restriction sites within the DNA parts to be used for assembly. A minimum of two enzymes are required for basic hierarchical assembly, and three enzymes are required for other schemes such as multi-step linear addition of DNA parts. Because most of the known type IIS restriction enzymes recognize <=6 bp sequence, most Moclo-based systems use 6 bp cutters. This requires that the DNA part must be free of two 6 bp asymmetric sequences, which occur at a frequency of ˜ 1 in 1 kb for a random DNA sequence with 50% GC content. A potential improvement of the current Moclo system would be to use type IIS restriction enzymes with 7 bp or more specificity. However, this option is limited by the availability of commercial type IIS restriction enzymes. Only two types of 7 bp type IIS restriction enzymes are currently commercially available: LguI/SapI which recognizes GCTCTTC and leaves 3 bp sticky end, and AarI which recognizes CACCTGC and leaves 4 bp sticky end. AarI also requires addition of oligonucleotides for complete digestion, which is undesirable for DNA assembly.

[0008] Existing type IIS restriction enzyme-based DNA assembly systems are also designed for modular DNA assembly which leave unwanted scar sequences in the final assembled DNA, and cannot be used to assemble arbitrary DNA sequence without making custom assembly vectors.

[0009] US20160002644 describes a system of DNA assembly. It uses two restriction enzymes LguI and Earl, and a strain with inducible expression of M.TaqI to block overlapping restriction sites in the assembly vector. The M.TaqI site overlaps with the 3 bp adhesive end sequence generated by LguI/Earl, which leaves severe constraints on adaptor sequence design.

[0010] What is required is an improved DNA assembly method which provides one or more of a greater freedom to choose and design adapter sequences, assembly with minimal scarring, less reaction steps or complexity, and the ability to assemble larger sequences of DNA. Therefore, an aim of the present invention is to provide an improved DNA assembly method and associated material.

### SUMMARY OF THE DISCLOSURE

[0011] According to a first aspect of the invention, there is provided a nucleic acid for use in DNA assembly, wherein the nucleic acid comprises at least one methylation-protectable restriction element, the methylation-protectable restriction element comprising:
[0012] a restriction enzyme recognition sequence that is recognised by a restriction enzyme that cleaves outside of the recognition sequence; and
[0013] a DNA methylase recognition sequence,
[0014] wherein the restriction enzyme recognition sequence and the DNA methylase recognition sequence overlap such that the base modified by the DNA methylase lies within the restriction enzyme recognition sequence,
[0015] wherein the DNA methylase recognition sequence is not identical to, or enclosed by, the restriction enzyme recognition sequence, and
[0016] wherein the DNA methylase recognition sequence does not overlap with the sequence that would form the overhang end sequence generated by the restriction enzyme.

[0017] The invention herein can advantageously allow for the use of a single restriction enzyme throughout different stages of DNA assembly. This reduces the cost and complexity of preparing a starting part of DNA fragment to be free of the restriction enzyme used. As the methylase recognition sequence does not overlap with the sequence that would form the overhang end sequence generated by the restriction enzyme, the invention further provides more freedom to design adapters (i.e. overhangs) for DNA fragment assembly. The invention also provides the first hierarchical scarless DNA assembly system that uses restriction enzyme-based assembly method. Unlike existing modular DNA assembly methods, which leave unwanted scar sequences in the final assembled DNA, the present invention can be used to assemble large and arbitrary DNA sequences without scarring. Existing scarless assembly systems, all of which are based on homology-based assembly method, such as Gibson assembly and yeast homologous recombination, are unable to assemble large DNA constructs with repetitive DNA sequences, in contrast to the present invention. The method of the invention also allows a simple design for hierarchical scarless assembly of DNA using a universal set of 6 plasmids.

[0018] The methylation of the cut control element may block/impair the overlapping restriction enzyme recognition site.

[0019] In one embodiment, the restriction enzyme that cleaves outside its recognition sequence is a type IIS restriction enzyme.

[0020] In one embodiment, the nucleic acid comprises at least two methylation-protectable restriction elements. In another embodiment, the nucleic acid has two methylation-protectable restriction elements. In an embodiment comprising two methylation-protectable restriction elements, the nucleic acid sequence between the cut sites of the two methylation-protectable restriction elements may be a discard sequence (i.e. an unwanted fragment that will be removed from the nucleic acid during a restriction reaction). In an alternative embodiment, the discard sequence may be previously removed. For example, the nucleic acid may be a previously-cut linearized vector having a methylation-protectable restriction element at each end.

[0021] The discard sequence may comprise a selectable marker, reporter gene, or label. The skilled person will be familiar with typical markers and reporter genes used in DNA assembly and cloning. For example, a selectable marker may comprise a gene encoding an antibiotic resistance, an enzymatic activity, a luciferase, or the like. The marker could be a label, such as a radiolabel. In one embodiment, the discard sequence encodes lacZ as a reporter. The skilled person will recognise that discard sequence, that may be replaced by the assembled sequence in a vector, may not contain any functional element at all, as the process of the invention favours generating assembled DNA.

[0022] Providing a selectable marker, reporter gene, or label on the discard sequence advantageously allows clones to be selected that have had the discard sequence successfully removed or replaced by a fragment/sequence of interest.

[0023] In one embodiment, an opposing non-protectable restriction enzyme recognition sequence is provided on the opposing side of the cut site of the methylation-protectable restriction element. For example, in an embodiment comprising a discard sequence, the opposing non-protectable restriction enzyme recognition sequence would be located in the discard sequence. The opposing non-protectable restriction enzyme recognition sequence may also be recognized by a restriction enzyme that cleaves outside its recognition sequence, such as a type IIS restriction enzyme. The opposing non-protectable restriction enzyme recognition sequence may not be protected by (or arranged to be protected by) methylation, or at least may not be protected by methylation from a methylase that recognizes the methylase recognition sequence of the methylation-protectable restriction element. Such an opposing non-protectable restriction enzyme recognition sequence in the discard sequence may otherwise be referred to as an “inner restriction enzyme recognition sequence”, whereas the restriction enzyme recognition sequence of the methylation-protectable restriction element may be referred to as an “outer restriction enzyme recognition sequence”.

[0024] The restriction enzyme recognition sequence of the methylation-protectable restriction element may be recognised by the same restriction enzyme species as the opposing non-protectable restriction enzyme recognition sequence. The restriction enzyme recognition sequence of the methylation-protectable restriction element may comprise the same sequence as the opposing non-protectable restriction enzyme recognition sequence.

[0025] In one embodiment, the nucleic acid may comprise a “maintained composite element”, wherein the opposing non-protectable restriction enzyme recognition sequence may be arranged to direct the restriction enzyme to cut the nucleic acid at the same site as the restriction enzyme recognition sequence of the methylation-protectable restriction element, such that the same overhang/sticky end would be produced at the same position. This may be achieved by providing the restriction enzyme recognition sequence and opposing non-protectable restriction enzyme recognition sequence at a specific distance apart, depending on the cut site provided by the restriction enzyme(s) selected. In this embodiment, the sequence of the overhang produced by the restriction enzyme cutting the nucleic acid according to the restriction enzyme recognition sequence of the methylation-protectable restriction element is maintained after cutting the nucleic acid with the restriction enzyme that recognizes the opposing non-protectable restriction enzyme recognition sequence of the discard sequence and a subsequent ligation with a DNA fragment insert. As such, this embodiment may be referred to as the “maintained composite element”. i.e. the maintained composite element may comprise two restriction sequences arranged in head-to-head direction (one of which is part of the methylation protectable element, and the other the opposing non-protectable restriction enzyme recognition sequence). The overhang produced from a maintained composite element may be pre-determined by the sequence between the opposing restriction recognition sequences.

[0026] In an alternative embodiment to the maintained composite element, there is provided a “truncating composite element”, wherein the distance between the methylation-protectable restriction element and the opposing non-protectable restriction enzyme recognition sequence may be reduced such that the opposing non-protectable restriction enzyme recognition sequence may be arranged to direct the restriction enzyme to cut the nucleic acid at a site that does not overlap the cut site of the restriction enzyme that recognizes the restriction enzyme recognition sequence of the methylation-protectable restriction element (i.e. such that the position of the subsequent overhangs created by the opposing cut sites do not overlap, and the subsequent overhangs may be different in sequence). The cut site of the opposing non-protectable restriction enzyme recognition sequence in a truncating composite element may be within the recognition sequence of the restriction enzyme recognition sequence of the methylation-protectable restriction element, and/or within the nucleotides between the cut site and the recognition sequence of the restriction enzyme recognition sequence of the methylation-protectable restriction element. In one embodiment, the cleavage point between base pairs at the end of one cut site and the cleavage point between base pairs at the start of the opposing cut site may be in adjacent/neighbouring base pairs (i.e. the cut sites may be immediately adjacent to each other, but do not overlap). This may be achieved by providing the restriction enzyme recognition sequence of the methylation-protectable restriction element and opposing non-protectable restriction enzyme recognition sequence at a specific distance apart, depending on the cut site provided by the restriction enzyme(s) selected. The distance will be close enough to cause cutting in the opposing non-protectable restriction enzyme recognition sequence and/or nucleotides between the recognition sequence and cut site, or vice versa (i.e. closer than the opposing restriction enzyme recognition sequences in the “maintained composite element” for an equivalent/same selected restriction enzyme(s)). In this truncating composite element embodiment, the sequence of the overhang produced by the restriction enzyme cutting the nucleic acid according to the restriction enzyme recognition sequence of the methylation-protectable restriction element may or may not be maintained after cutting the nucleic acid with the restriction enzyme that recognizes the opposing non-protectable restriction enzyme recognition sequence of the discard sequence and a subsequent ligation with a DNA fragment insert, whereby the sequence of the DNA fragment insert would dictate the sequence of the overhang (e.g. the overhang produced from a truncating composite element may not be pre-determined by the sequence between the opposing restriction enzyme recognition sites).

[0027] In an alternative embodiment to the maintained composite element and truncated composite element, there is provided an “insertional composite element”, wherein a sequence insert is provided between the methylation-protectable restriction element and the opposing non-protectable restriction enzyme recognition sequence. The sequence insert may comprise a functional sequence such that it provides a function. For example, the sequence insert may comprise a promoter sequence or a terminator sequence. In an embodiment comprising an insertional composite element the methylation-protectable restriction element and the opposing non-protectable restriction enzyme recognition sequence may not overlap and may be distanced apart by the sequence insert. The sequence insert may be any suitable length. For example, the distance between the methylation-protectable restriction element and the opposing non-protectable restriction enzyme recognition sequence may be any number of nucleotides as required for the sequence insert, such as a functional sequence insert. The distance between the restriction enzyme recognition sequence within the methylation-protectable restriction element and the opposing non-protectable restriction enzyme recognition sequence may range between 6 bp to 300 kb.

[0028] Advantageously, following DNA assembly, the functional sequence will be added into the 5′ or 3′ end of the assembled DNA. This design is convenient for adding common elements to an assembled plasmid by using specialized vectors (for example adding promoter and terminators in a multi-part coding region gene assembly reaction).

[0029] In one embodiment, for the “maintained composite element”, the opposing non-protectable restriction enzyme recognition sequence (such as a BsaI sequence) may be distanced apart from the restriction enzyme recognition sequence (such as a BsaI sequence) of the methylation-protectable restriction element by 6 base pairs (i.e. 6 bp in the gap between the end of one recognition sequence and the start of the opposing recognition sequence). The skilled person will recognise that such distance depends on the property of the restriction enzyme(s) selected. For example, assuming the enzyme cuts x bases from the recognition sequence and generates y bases of adhesive end/overhang (e.g. for BsaI x=1 and y=4), then the distance (d) for the number of bases between opposing restriction enzyme recognition sequences of the maintained composite element may be provided by the following equation: d=(2*x)+y (e.g. d=6 bp for BsaI). The distance (d) for the maintained composite element may range from 5 bp (e.g. when using Earl) to 24 bp (e.g. when using BtgZI). In one embodiment, the difference between the opposing restriction enzyme recognition sequences of the maintained composite element is d, wherein d=(2*x)+y, and wherein x is the number of base pairs the cut site of a given restriction enzyme is from its recognition sequence, and y is the length of the overhang that would be produced by the restriction enzyme.

[0030] In the alternative truncating composite element embodiment, for example where the overhang produced by the restriction enzyme recognition sequence of the methylation-protectable restriction element may or may not be maintained, the opposing non-protectable restriction enzyme recognition sequence (such as for BsaI) may be distanced apart from the restriction enzyme recognition sequence (such as for BsaI) of the methylation-protectable restriction element by 2 base pairs. As above, the skilled person will recognise that such distance depends on the property of the restriction enzyme(s) selected. For example, assuming the enzyme cuts x bases from the recognition sequence and generates y bases adhesive end (for BsaI x=1 and y=4), the distance (d) for the number of bases between opposing restriction enzyme recognition sequences of the truncating composite element may be provided by the following equation: d=2*x (e.g. d=2 bp for BsaI). The distance (d) for the truncating composite element may range from 2 bp (e.g. when using BsaI) to 20 bp (e.g. when using BtgZI). In one embodiment, the difference between the opposing restriction enzyme recognition sequences of the truncating composite element is d, wherein d=2*x, and wherein x is the number of base pairs the cut site of a given restriction enzyme is from its recognition sequence.

[0031] Advantageously, the provision of a maintained composite element facilitates one-pot DNA assembly, whereby multiple fragments of DNA may be assembled in a single one-pot reaction with a single restriction enzyme species. Advantageously, the provision of a truncating composite element facilitates scarless DNA assembly, whereby the overhang ends of a particular DNA fragment insert can be pre-determined to be adapted for ligation into a destination vector or provided in accordance with the native sequence of the DNA fragment of interest for joining with neighbouring fragments in the sequence.

[0032] In one embodiment, the nucleic acid may comprise a circular nucleic acid, such as a vector, comprising two maintained composite elements with a discard sequence therebetween, or a linearized version thereof with the discard sequence cut out. In another embodiment, the nucleic acid may comprise a circular nucleic acid, such as a vector, comprising a maintained composite element and a truncating composite element with a discard sequence therebetween, or a linearized version thereof with the discard sequence cut out. In another embodiment, the nucleic acid may comprise a circular nucleic acid, such as a vector, comprising two truncating composite elements with a discard sequence therebetween, or a linearized version thereof with the discard sequence cut out. In another embodiment, the nucleic acid may comprise a circular nucleic acid, such as a vector, comprising an insertional composite element and a truncating composite element with a discard sequence therebetween, or a linearized version thereof with the discard sequence cut out. In another embodiment, the nucleic acid may comprise a circular nucleic acid, such as a vector, comprising an insertional composite element and a maintained composite element with a discard sequence therebetween, or a linearized version thereof with the discard sequence cut out. In another embodiment, the nucleic acid may comprise a circular nucleic acid, such as a vector, comprising two insertional composite elements with a discard sequence therebetween, or a linearized version thereof with the discard sequence cut out. In linearized nucleic acid embodiments, the discard sequence may have been cut out by restriction with the restriction enzyme that recognises the opposing non-protectable restriction enzyme sequence present on the discard sequence (i.e. the inner restriction enzyme recognition sequence).

[0033] In embodiments comprising two maintained composite elements, the restriction enzyme recognition sequences of the two maintained composite elements may be the same and/or the methylase recognition sequences of the two maintained composite elements may be the same. In embodiments comprising two truncated composite elements, the restriction enzyme recognition sequences of the two truncated composite elements may be the same and/or the methylase recognition sequences of the two truncated composite elements may be the same. In embodiments comprising two insertional composite elements, the restriction enzyme recognition sequences of the two insertional composite elements may be the same and/or the methylase recognition sequences of the two insertional composite elements may be the same. In embodiments comprising a maintained composite element and a truncated composite element, the restriction enzyme recognition sequences of the maintained and truncated composite elements may be the same and/or the methylase recognition sequences of the maintained and truncated composite elements may be the same. In embodiments comprising a maintained composite element and an insertional composite element, the restriction enzyme recognition sequences of the maintained and insertional composite elements may be the same and/or the methylase recognition sequences of the maintained and insertional composite elements may be the same. In embodiments comprising a truncated composite element and an insertional composite element, the restriction enzyme recognition sequences of the truncated and insertional composite elements may be the same and/or the methylase recognition sequences of the truncated and insertional composite elements may be the same. For example, digestion of the nucleic acid to remove a discard sequence or DNA fragment of interest may be carried out by the same restriction enzyme. Additionally the methylation of the nucleic acid to protect all the methylase-protectable restriction enzyme recognition sites in the nucleic acid may be carried out by the same methylase.

[0034] In one embodiment, the methylase comprises a type II DNA methylase. In another embodiment, the methylase comprises a type I DNA methylase. In one embodiment, the methylase comprises a single domain methylase without restriction enzyme activity, or a modified methylase having a non-functional restriction enzyme activity. For example, the modification may comprise modifying the N6 position of methyladenine. In one embodiment, the DNA methylase recognition sequence comprises at least 4 base pairs. The DNA methylase may be active, such as optimally active, at about 37° C.

[0035] In one embodiment, the opposing non-protectable restriction enzyme recognition sequence is not capable of being blocked by methylation with the methylase that recognises the DNA methylase recognition sequence of the methylation-protectable restriction element. In one embodiment, the methylase that recognises the DNA methylase recognition sequence of the methylation-protectable restriction element may not recognise a sequence within or overlapping with the opposing non-protectable restriction enzyme recognition sequence. For example, the non-protectable opposing restriction enzyme recognition sequence may not overlap with or comprise a sequence that is recognised by the methylase that recognises DNA methylase recognition sequence of the methylation-protectable restriction element. The restriction enzyme recognition sequence of the methylation-protectable restriction element may be methylated, for example by the methylase that recognises the DNA methylase recognition sequence of the methylation-protectable restriction element. The methylase that recognises the DNA methylase recognition sequence of the methylation-protectable restriction element may be arranged to methylate a nucleotide within the sequence of the restriction enzyme recognition sequence of the methylation-protectable restriction element. The methylation may be capable of blocking the cutting of the DNA by the restriction enzyme that recognises the restriction enzyme recognition sequence of the methylation-protectable restriction element. In one embodiment, the restriction enzyme recognition sequence of the methylation-protectable restriction element may become non-functional as a result of methylation of at least one of the nucleotides in the sequence. In one embodiment, the methylated nucleotide may be an adenine, or the nucleotide arranged to be methylated may be an adenine. In another embodiment, the methylated nucleotide may be a cytosine, or the nucleotide arranged to be methylated may be a cytosine. The methylation may be any one of methylation types selected from N4-methylcytosine (m4C), C5-methyylcytosine (m5C) or N6-methyladenine (m6A). The skilled person will recognize that the type of methylation provided should block/impair the overlapping restriction site function. Additionally, for in vivo methylation, the strain used to express the methylase may be deficient for modification-dependent restriction enzymes that may recognize the methylated bases, such as Mcr/Mrr family restriction enzymes. In one embodiment, the methylation type may comprise N6-methyladenine (m6A).

[0036] In one embodiment, the methylase may or may not methylate the outer-most bases of the restriction enzyme recognition sequence. For example in a restriction enzyme recognition sequence of 6 bp, the bases 1 or 6 may not be methylated. In one embodiment, the methylase may or may not methylate the 2^{nd} base of the restriction enzyme recognition sequence. In one embodiment, the methylase may methylate position 3, 4, or 5 for 6 bp restriction enzyme recognition sites. In one embodiment, the methylase may methylate position 3, 4, 5, or 6 for restriction enzyme recognition sites.

[0037] In an embodiment comprising two methylation-protectable restriction elements, the DNA methylase recognition sequences of each methylation-protectable restriction element may be recognised by the same methylase. The DNA methylase recognition sequence of the methylation-protectable restriction elements may comprise or consist of the same sequence.

[0038] In an embodiment comprising two methylation-protectable restriction elements, the restriction enzyme recognition sequences of each methylation-protectable restriction element may be recognised by the same restriction enzyme species. Each restriction enzyme recognition sequence of the methylation-protectable restriction elements may comprise or consist of the same sequence. The two methylation-protectable restriction elements may comprise or consist of the same sequence.

[0039] The use of the same restriction enzyme recognition sequence advantageously provides that a single restriction enzyme species can be used in a DNA assembly reaction. The use of a single restriction enzyme species opens the possibility of less complex DNA assembly, because the presence of further restriction enzyme species in a reaction significantly increases the probability the more that the sequence will randomly/inadvertently contain a recognition and restriction cut site, causing a failure in the cloning procedure.

[0040] In one embodiment, the methylation-protectable restriction element comprises or consists of a sequence according to any one of the overlapping methylation/restriction sites identified in Table 3 herein. In an alternative embodiment, the methylation-protectable restriction element comprises or consists of a sequence according to any one of the overlapping methylation/restriction sites identified in Table 3 herein, excluding those which provide methylation of the first or last base in the restriction sequence. In one embodiment, the methylation-protectable restriction element comprises or consists of the sequence GACNNGGTCTCNNNNN (BsaI/M.Osp807II—SEQ ID NO: 1). In another embodiment, the methylation-protectable restriction element comprises or consists of the sequence GAAGACGCNNNNNN (BpiI/M2.NmeMC58II—SEQ ID NO: 2). In another embodiment, the methylation-protectable restriction element comprises or consists of the sequence GAAGCTCTTCNNNN (LguI/M.XmnI—SEQ ID NO: 3).

[0041] In one embodiment, the methylation-protectable and/or non-protectable restriction enzyme recognition sequence comprises or consists of a sequence according to any one of the restriction enzyme recognition sequences identified in Table 3 herein. In an alternative embodiment, the methylation-protectable and/or non-protectable restriction enzyme recognition sequence comprises or consists of a sequence according to any one of the restriction enzyme recognition sequences identified in Table 3 herein, excluding those which provide for methylation of the first or last base in the restriction sequence. In one embodiment, the methylation-protectable and/or non-protectable restriction enzyme recognition sequence comprises or consists of the sequence GGTCTC (BsaI-SEQ ID NO: 4). In another embodiment, the methylation-protectable and/or non-protectable restriction enzyme recognition sequence comprises or consists of a sequence GAAGAC (BpiI—SEQ ID NO: 5). In another embodiment, the methylation-protectable and/or non-protectable restriction enzyme recognition sequence comprises or consists of a sequence GCTCTTC (LguI—SEQ ID NO: 6).

[0042] In one embodiment, the DNA methylase recognition sequence comprises or consists of a sequence according to any one of the type II DNA methylase recognition sequences identified in Table 3 herein. In an alternative embodiment, the DNA methylase recognition sequence comprises or consists of a sequence according to any one of the type II DNA methylase recognition sequences identified in Table 3 herein, excluding those which provide methylation of the first or last base in the restriction sequence. In one embodiment, the DNA methylase recognition sequence comprises or consists of the sequence GACNNNGTC (M.Osp807II—SEQ ID NO: 7). In another embodiment, the DNA methylase recognition sequence comprises or consists of the sequence GACGC (M2.NmeMC58II—SEQ ID NO: 8). In another embodiment, the DNA methylase recognition sequence comprises or consists of the sequence GAANNNNTTC (M.XmnI—SEQ ID NO: 9).

[0043] The restriction enzyme that recognizes the restriction enzyme recognition sequence of the methylation-protectable restriction element, and/or the opposing restriction enzyme recognition sequence, may be capable of cutting nucleic acid to leave at least a 2 bp overhang/sticky end. Alternatively, the restriction enzyme that recognizes the restriction enzyme recognition sequence of the methylation-protectable restriction element, and/or the opposing restriction enzyme recognition sequence, may be capable of cutting nucleic acid to leave at least a 3 bp overhang/sticky end. In another embodiment, the restriction enzyme that recognizes the restriction enzyme recognition sequence of the methylation-protectable restriction element, and/or the opposing restriction enzyme recognition sequence, may be capable of cutting nucleic acid to leave a 3 bp overhang/sticky end. In another embodiment, the restriction enzyme that recognizes the restriction enzyme recognition sequence of the methylation-protectable restriction element, and/or the opposing restriction enzyme recognition sequence, may be capable of cutting nucleic acid to leave a 4 bp overhang/sticky end. In another embodiment, the restriction enzyme that recognizes the restriction enzyme recognition sequence of the methylation-protectable restriction element, and/or the opposing restriction enzyme recognition sequence, may be capable of cutting nucleic acid to leave a 2 bp to 6 bp overhang/sticky end. In another embodiment, the restriction enzyme that recognizes the restriction enzyme recognition sequence of the methylation-protectable restriction element, and/or the opposing restriction enzyme recognition sequence, may be capable of cutting nucleic acid to leave a 2 bp to 5 bp overhang/sticky end. In another embodiment, the restriction enzyme that recognizes the restriction enzyme recognition sequence of the methylation-protectable restriction element, and/or the opposing restriction enzyme recognition sequence, may be capable of cutting nucleic acid to leave a 3 bp to 5 bp overhang/sticky end. In another embodiment, the restriction enzyme that recognizes the restriction enzyme recognition sequence of the methylation-protectable restriction element, and/or the opposing restriction enzyme recognition sequence, may be capable of cutting nucleic acid to leave a 4 bp to 5 bp overhang/sticky end.

[0044] In one embodiment, the restriction enzyme comprises or consists of any one type IIS restriction enzyme identified in Table 3 herein. In another embodiment, the type IIS restriction enzyme comprises or consists of BsaI, BpiI, or LguI.

[0045] In one embodiment, the DNA methylase comprises or consists of any one type II DNA methylase identified in Table 3 herein. In an alternative embodiment, the DNA methylase comprises or consists of any one type II DNA methylase identified in Table 3 herein, excluding those which provide methylation of the first or last base in the restriction sequence. In another embodiment, the DNA methylase comprises or consists of M.Osp807II, M2. NmeMC58II, or M.XmnI.

[0046] In one embodiment, the restriction enzyme and the DNA methylase comprise or consist of any one pairing of type IIS restriction enzymes and the type II DNA methylases identified in Table 3 herein. In one embodiment, the restriction enzyme and the DNA methylase comprise or consist of the pairings BsaI/M.Osp807II, BpiI/M2.NmeMC58II, or LguI/M.XmnI.

[0047] In one embodiment, the restriction enzyme recognition sequence and the DNA methylase recognition sequence comprise or consist of any one pairing of type IIS restriction enzyme recognition sequences and the type II DNA methylase recognition sequences identified in Table 3 herein. In an alternative embodiment, the restriction enzyme recognition sequence and the DNA methylase recognition sequence comprise or consist of any one pairing of type IIS restriction enzyme recognition sequences and the type II DNA methylase recognition sequences identified in Table 3 herein, excluding those which provide methylation of the first or last base in the restriction sequence.

[0048] In an embodiment comprising two methylation-protectable restriction elements (for example with a discard sequence therebetween), the overhang/sticky end produced by cutting with the restriction enzyme at the first methylation-protectable restriction element may be different in sequence than the overhang/sticky end produced by cutting with the restriction enzyme at the second methylation-protectable restriction element. The skilled person will be familiar with providing different overhangs for directional DNA assembly/cloning or controlling which end of the nucleic acid is ligated to an insert/fragment of interest.

[0049] In one embodiment involving a maintained composite element, the nucleic acid may comprise or consist of the sequence of GACNNGGTCTCNNNNNNGAGACC (SEQ ID NO: 10). In another embodiment involving a maintained composite element, the nucleic acid may comprise or consist of the sequence of GAAGACGCNNNNNNGTCTTC (SEQ ID NO: 11). In another embodiment involving a maintained composite element, the nucleic acid may comprise or consist of the sequence of GAAGCTCTTCNNNNNGAAGAGC (SEQ ID NO: 12). N may mean A, C, T or G. Other sequences may be provided according to the combined/overlapping restriction enzyme and methylase recognition sequences provided in table 3, wherein following the series of N bases, the sequence further comprises the palindromic/reverse-complementary sequence of the restriction enzyme recognition sequence.

[0050] In one embodiment involving two maintained composite elements, the nucleic acid may comprise or consist of the sequence of GACNNGGTCTCNNNNNNGAGACC(N^{x})GGTCTCNNNNNNGAGACCNNGTC (SEQ ID NO: 13). In another embodiment involving two maintained composite elements, the nucleic acid may comprise or consist of the sequence of GAAGACGCNNNNNNGTCTTC(N^{x})GAAGACNNNNNNGCGTCTTC (SEQ ID NO: 14). In another embodiment involving two maintained composite elements, the nucleic acid consist of may comprise or the sequence of GAAGCTCTTCNNNNNGAAGAGC(N^{x})GCTCTTCNNNNNGAAGAGCTTC (SEQ ID NO: 15). N may mean A, C, T or G. (N^{x}) may mean any number of A, C, T or G, or between 0 bp and 300 kbp of A, C, T, or G.

[0051] The skilled person will understand that for some restriction enzyme recognition sequences, such as for LguI, the number of nucleotides (N^{x}) between two maintained composite elements could be negative with the two inner nonprotectable restriction enzyme recognition sites overlapping. Therefore, in another embodiment involving two maintained composite elements, the nucleic acid may comprise or consist of the sequence of GAAGCTCTTCNNNNNGAAGAGCTCTTCNNNNNGAAGAGCTTC (SEQ ID NO: 16) (the overlapping nucleotides are shown in bold and underlined).

[0052] In one embodiment involving a truncated composite element, the nucleic acid may comprise or consist of the sequence of GACNNGGTCTCNNGAGACC (SEQ ID NO: 17). In one embodiment involving a truncated composite element, the nucleic acid may comprise or consist of the sequence of GAAGCTCTTCNNGAAGAGC (SEQ ID NO: 18). N may mean A, C, T or G. N may mean A, C, T or G. Other sequences may be provided according to the combined/overlapping restriction enzyme and methylase recognition sequences provided in table 3, wherein following the series of N bases, the sequence further comprises the palindromic/reverse-complementary sequence of the restriction enzyme recognition sequence, and wherein the number of N bases between the restriction recognition sequences is reduced by the number overhang bases produced by the selected restriction enzyme.

[0053] In one embodiment involving a maintained and truncated composite element, the nucleic acid may comprise or consist of the sequence of GACNNGGTCTCNNNNNNGAGACC(N^{x})GGTCTCNNGAGACCNNGTC (SEQ ID NO: 19). In one embodiment involving a maintained and truncated composite element, the nucleic acid comprise or consist of may the sequence of GAAGCTCTTCNNNNNGAAGAGC(N^{x})GCTCTTCNNGAAGAGCTTC (SEQ ID NO: 20). N may mean A, C, T or G. (N^{x}) may mean any number of A, C, T or G, or between 0 bp and 300 kbp of A, C, T, or G.

[0054] The skilled person will understand that for some restriction enzyme recognition sequences, such as for LguI, the number of nucleotides (N^{x}) between a maintained and truncated composite element could be negative with the two inner nonprotectable restriction enzyme recognition sites overlapping. Therefore, in another embodiment involving a maintained and truncated composite element, the nucleic acid may comprise or consist of the sequence of GAAGCTCTTCNNNNNGAAGAGCTCTTCNNGAAGAGCTTC (SEQ ID NO: 21) (the overlapping nucleotides are shown in bold and underlined).

[0055] In one embodiment involving a maintained and truncated composite element, the nucleic acid may comprise or consist of the sequence of GACNNGGTCTCNNGAGACC(N^{x})GGTCTCNNNNNNGAGACCNNGTC (SEQ ID NO: 22). In one embodiment involving a maintained and truncated composite element, the nucleic acid may comprise or consist of the sequence of GAAGCTCTTCNNGAAGAGC(N^{x})GCTCTTCNNNNNGAAGAGCTTC (SEQ ID NO: 23). N may mean A, C, T or G. (N^{x}) may mean any number of A, C, T or G, or between 0 bp and 300 kbp of A, C, T, or G. In another embodiment involving a maintained and truncated composite element, the nucleic acid may comprise or consist of the sequence of GAAGCTCTTCNNGAAGAGCTCTTCNNNNNGAAGAGCTTC (SEQ ID NO: 24) (the overlapping nucleotides are shown in bold and underlined).

[0056] In one embodiment involving two truncated composite elements, the nucleic acid may comprise or consist of the sequence of GACNNGGTCTCNNGAGACC(N^{x})GGTCTCNNGAGACCNNGTC (SEQ ID NO: 25). In one embodiment involving two truncated composite elements, the nucleic acid may comprise or consist of the sequence of GAAGCTCTTCNNGAAGAGC(N)GCTCTTCNNGAAGAGCTTC (SEQ ID NO: 26). N may mean A, C, T or G. (N^{x}) may mean any number of A, C, T or G, or between 0 bp and 300 kbp of A, C, T, or G.

[0057] The skilled person will understand that for some restriction enzyme recognition sequences, such as for LguI, the number of nucleotides (N^{x}) between two truncated composite elements could be negative with the two inner nonprotectable restriction enzyme recognition sites overlapping. Therefore, in another embodiment involving two truncated composite elements, the nucleic acid may comprise or consist of the sequence of GAAGCTCTTCNNGAAGAGCTCTTCNNGAAGAGCTTC (SEQ ID NO: 27) (the overlapping nucleotides are shown in bold and underlined).

[0058] The nucleic acid may be isolated nucleic acid. In one embodiment, the nucleic acid may be synthetic (i.e. not found in nature). In one embodiment, the nucleic acid may be isolated or derived from a bacterial strain, such as E. coli, that expresses a DNA methylase that recognises (and methylates) the methylase recognition sequence of the methylation-protectable restriction element. For example, a bacterial strain, such as E. coli, that expresses any one type II DNA methylase identified in Table 3 herein. In one embodiment the nucleic acid may be isolated or derived from a bacterial strain, such as E. coli, that expresses M.Osp807II, M2.NmeMC58II, or M.XmnI. The expressed DNA methylase may be functional. The bacterial strain may be genetically modified/engineered to express such DNA methylase.

[0059] The nucleic acid may be a vector, such as a cloning vector. The skilled person will be familiar with various cloning vectors, which may include, for example, a replication origin, a selectable marker, a reporter gene, expression elements, or combinations thereof. The vector may comprise nucleic acid that comprises a DNA element that supports the replication of DNA that contains it (e.g. a replication origin) and a selection marker (e.g. an antibiotic selection marker). The vector may be a high or low copy number vector. In one embodiment, the vector is a high copy number vector. The skilled person will be familiar with cloning methods and materials/vectors, for example as provided in Green, M. R., Sambrook, J. Molecular Cloning: A Laboratory Manual. 4th. Cold Spring Harbor Laboratory Press, Cold Spring Harbor, NY; 2012, which is herein incorporated by reference.

[0060] In linearized embodiments of the nucleic acid, the nucleic acid may not comprise more than two copies/sites of the restriction enzyme recognition sequence.

[0061] According to another aspect of the invention, there is provided a method of assembling DNA comprising:
[0062] providing a linearised methylated nucleic acid according to the invention, wherein the methylation-protectable restriction element is methylated with the DNA methylase;
[0063] providing two or more DNA fragments of interest for assembly with the linearised methylated nucleic acid, wherein a first DNA fragment comprises a complementary overhang for ligation with a first end of the linearised methylated nucleic acid, and a second DNA fragment comprises complementary overhangs for ligation with the other/second end of the linearised methylated nucleic acid; and
[0064] (i) the first and second DNA fragments further comprise complementary overhangs for ligation with each other; or
[0065] (ii) the first and second DNA fragments further comprise complementary overhangs for ligation with one or more further DNA fragments having complementary overhangs, such that ligating the DNA fragments and the linearised methylated nucleic acid with a DNA ligase would result in a single assembled DNA molecule;
[0066] ligating the DNA fragments and linearised methylated nucleic acid with a ligase to form a single assembled DNA molecule comprising the sequence of the assembled DNA fragments flanked by the restriction enzyme recognition sequences of the methylation-protectable restriction elements.

[0067] The single assembled DNA molecule may be circular, such as a circular DNA vector.

[0068] Advantageously, further cutting of the single assembled DNA molecule by the restriction enzyme that recognises the restriction enzyme recognition sequences of the methylation-protectable restriction elements is blocked by the methylation of the restriction enzyme recognition sequences.

[0069] The linearised nucleic acid may be provided by providing a nucleic acid according to the invention in the form of a circular destination vector comprising two methylated methylation-protectable restriction elements and a discard sequence therebetween, wherein the method comprises the step of cutting the circular destination vector with restriction enzymes that recognise the opposing non-protectable restriction enzyme recognition sequences in the discard sequence, thereby leaving a linearised nucleic acid having overhangs defined by the restriction enzymes. The restriction enzymes may be the same species. The restriction enzyme recognition sequences of the methylated methylation-protectable restriction elements may comprise the same sequence. In one embodiment, the restriction enzyme recognition sequences of the methylated methylation-protectable restriction elements and the opposing non-protectable restriction enzyme recognition sequences may comprise the same sequence.

[0070] The restriction enzyme and methylase (or recognition sequences thereof) used in the method of the invention may be selected in accordance with the restriction enzyme and methylases (or recognition sequences thereof) provided for the nucleic acid aspect of the present invention herein.

[0071] The circular destination vector may be purified/isolated from a bacterial strain that expresses the DNA methylase that recognises the DNA methylase recognition sequence of the methylation-protectable restriction element. In another embodiment, the circular or linearised destination vector may be methylated by the DNA methylase in vitro.

[0072] The two or more DNA fragments of interest for assembly with the nucleic acid may be provided in circular donation vectors, wherein the method comprises the step of cutting the circular donation vectors to release the DNA fragments of interest. The cutting of the donor vectors may be with a restriction enzyme that leaves complementary overhangs for ligation with the linearised methylated nucleic acid. The cutting of the donor vectors may be with a restriction enzyme that leaves complementary overhangs for ligation with the linearised methylated nucleic acid and with another DNA fragment of interest for insertion. The cutting of the donor vectors may be with a restriction enzyme that leaves complementary overhangs for ligation with two other DNA fragments of interest for insertion.

[0073] The restriction enzyme for cutting the circular donation vectors may comprise a type IIS restriction enzyme. The restriction enzyme for cutting the circular donation vectors may comprise the same restriction enzyme, or a restriction enzyme that recognises the same sequence, as the restriction enzyme used to cut the circular destination vector. The complementary overhangs of the DNA fragments of interest for ligation with the linearised nucleic acid may be defined by the restriction enzyme.

[0074] Advantageously, the provision of the same restriction enzyme recognition sequence for the methylation-protectable restriction elements, the opposing restriction enzyme recognition sequence on the discard sequence, and the restriction enzyme recognition sequences on the donor vectors provides that a single type of restriction enzyme can be used. This allows for reduced cost/complexity in removing internal type IIS restriction site from DNA parts, because there are less restriction sites to remove. This makes assembly of longer sequence easier and less costly. Furthermore, the invention allows for a so-called “one-pot” reaction, whereby the restriction and ligation can be carried out in one pot in a single step.

[0075] Therefore, the method may combine the steps of restricting and ligating. In particular, the circular destination vector, the donor vectors, the restriction enzyme and the ligase may be provided in the same composition.

[0076] Following assembly of the single assembled DNA molecule, the method may further comprise the step of transforming the single assembled DNA molecule into a bacterial strain that does not express the DNA methylase that recognises the DNA methylase recognition sequence of the methylation-protectable restriction element.

[0077] Advantageously, transforming the single assembled DNA molecule into a bacterial strain that does not express the DNA methylase that recognises the DNA methylase recognition sequence of the methylation-protectable restriction element results in the cloning and production of a nucleic acid sequence, such as a vector, that comprises a non-methylated (i.e. non-blocked) restriction enzyme recognition sequence to allow subsequent restriction reactions.

[0078] The method may further comprise a multistage assembly process in order to form assembled DNA fragments or vectors of greater sequence length. For example the assembled DNA, which is the product of the method of the invention, may be used further for a higher order assembly. For example, the method may comprise a second round of DNA assembly according to the invention wherein the DNA fragments of interest for assembly with the linearised methylated nucleic acid may comprise assembled DNA from a first/earlier DNA assembly round according to the invention.

[0079] Providing multiple rounds of DNA assembly to form larger fragments of DNA advantageously reduces the number of adapter/overhang sequences that are necessary. The success rate of DNA assembly is also increased with fewer DNA fragments to be assembled. Additionally, it can be easier to screen for the successfully assembled DNA with fewer fragments assembled in a single reaction.

### Scarless DNA Assembly Method

[0080] According to another aspect of the present invention, there is provided a method of scarless DNA assembly of DNA fragments comprising the steps of:
[0081] (A) providing a first linearised methylated nucleic acid according to the invention, having a maintained composite element at one end and a truncating composite element at the other end, wherein the maintained and truncating composite elements are methylated with the DNA methylase;
[0082] providing a first DNA fragment for assembly having overhang ends that are adapted to ligate to the overhang ends of the first linearised methylated nucleic acid;
[0083] ligating the first DNA fragment for assembly and first linearised methylated nucleic acid with a ligase to form a first methylated intermediate vector;
[0084] transforming the first methylated intermediate vector into a bacterial strain that does not express the DNA methylase(s) that recognises either of the DNA methylase recognition sequence(s) of the maintained and truncating composite elements, thereby forming a first intermediate vector that is not methylated;
[0085] isolating the first intermediate vector;
[0086] (B) providing a second linearised methylated nucleic acid according to the invention, having a maintained composite element at one end and a truncating composite element at the other end, wherein the maintained and truncating composite elements are methylated with the DNA methylase, and wherein the overhang provided by the maintained composite element of the first linearised methylated nucleic acid is different in sequence to the overhang provided by the methylation-protectable restriction element of the second linearised methylated nucleic acid;
[0087] providing a second DNA fragment for assembly having overhang ends that are adapted to ligate to the overhang ends of the second linearised methylated nucleic acid;
[0088] ligating the second DNA fragment for assembly and second linearised methylated nucleic acid with a ligase to form a second methylated intermediate vector;
[0089] transforming the second methylated intermediate vector into a bacterial strain that does not express the DNA methylase(s) that recognises either of the DNA methylase recognition sequence(s) of the maintained and truncating composite elements, thereby forming a second intermediate vector that is not methylated;
[0090] isolating the second intermediate vector;
[0091] (C) cutting the first intermediate vector with a restriction enzyme that recognises the restriction enzyme recognition sequence of the maintained composite element and a restriction enzyme that recognises the restriction enzyme recognition sequence of the truncating composite element, thereby forming a first adapted DNA fragment insert that comprises a maintained-overhang sequence that is determined by the maintained composite element and an opposing native-overhang sequence that is determined by the native sequence of the first DNA fragment for assembly;
[0092] (D) cutting the second intermediate vector with a restriction enzyme that recognises the restriction enzyme recognition sequence of the maintained composite element and a restriction enzyme that recognises the restriction enzyme recognition sequence of the truncating composite element, thereby forming a second adapted DNA fragment insert that comprises a maintained-overhang sequence that is determined by the maintained composite element and an opposing native-overhang sequence that is determined by the native sequence of the second DNA fragment for assembly;
[0093] wherein
[0094] (i) the first and second adapted DNA fragments are end fragments wherein their native-overhang sequences are complementary, such that they are arranged to ligate together; or
[0095] (ii) one or more middle DNA fragments for assembly are provided wherein the first and second adapted DNA fragments are respective end fragments in the assembly, and the one or more middle DNA fragments are arranged to be ligated between the first and second adapted DNA fragments via complementary native-overhang sequences;
[0096] further comprising the step of ligating together, with a ligase, the first and second adapted DNA fragments, or the first and second adapted DNA fragments and one or more middle DNA fragments, to form an assembled DNA fragment having maintained-overhangs at each end.

[0097] The one or more middle DNA fragments may comprise native-overhang sequences at both ends that are determined by their native sequence. In an embodiment comprising a single middle DNA fragment for assembly, the middle DNA fragment may comprise a first native-overhang sequence that is complementary to the native-overhang of the first adapted DNA fragment and a second native-overhang sequence that is complementary to the native-overhang of the second adapted DNA fragment.

[0098] In an embodiment comprising a two or more middle DNA fragments for assembly, the middle DNA fragments may each comprise native-overhang sequences that are complementary to the native-overhang of a neighbouring middle DNA fragment, such that they can be ligated together in a pre-determined order. The first and last middle DNA fragments in a sequence will be arranged to ligate to the respective first adapted DNA fragment and second adapted DNA fragment via complementary native-overhang sequences.

[0099] In one embodiment, a middle DNA fragment for assembly may be provided by
[0100] providing a further linearised methylated nucleic acid according to the invention, wherein the linearised methylated nucleic acid comprises a truncating composite element at each end, wherein the truncating composite elements are methylated with the DNA methylase;
[0101] providing an adapted middle DNA fragment for assembly having overhang ends that are adapted to ligate to the overhang ends of the linearised methylated nucleic acid;
[0102] ligating the adapted middle DNA fragment for assembly and linearised methylated nucleic acid with a ligase to form a methylated intermediate vector;
[0103] transforming the methylated intermediate vector into a bacterial strain that does not express the DNA methylase(s) that recognises either of the DNA methylase recognition sequence(s) of the truncating composite elements, thereby forming an intermediate vector that is not methylated;
[0104] isolating the intermediate vector;
[0105] cutting the intermediate vector with restriction enzymes that recognise the restriction enzyme recognition sequence of the truncating composite elements, thereby forming a middle DNA fragment insert that comprises native-overhang sequences at each end that are determined by the native sequence of the middle DNA fragment for assembly.

[0106] The DNA fragments for assembly may comprise double stranded DNA comprising the overhangs/stick ends at each end. A DNA fragment for assembly may be prepared by PCR from a template, by gene synthesis, or by annealing of two oligonucleotides. Such processes, e.g. PCR or gene synthesis, may generate blunt ended double stranded DNA. For assembly starting with PCR product, an appropriate adaptor sequence containing the restriction site may be included in the PCR primer to trim the DNA to generate the overhangs for cloning into the intermediate vectors. For embodiments comprising the use of annealed oligonucleotides there are more choices. The sequence design could be the same as for PCR/gene synthesis with restriction sites at both ends for trimming with a restriction enzyme to generate the overhangs. Alternatively, two annealed oligos may form the overhangs themselves.

[0107] In one embodiment, the DNA fragments for assembly, such as the first DNA fragment for assembly, the second DNA fragment for assembly, and the one or more adapted middle DNA fragments for assembly, may be provided by PCR from a template sequence (i.e. the DNA fragments for assembly may be PCR products). The template sequence may provide the full sequence that is desired to be cloned as the assembled DNA fragment. The DNA fragments for assembly may be replicated, for example by PCR, from different sections of the template, and generated neighbouring PCR products may partially overlap in sequence (i.e. the sequence near the end of one PCR product may comprise the same sequence near the start of the next PCR product for assembly). The overlap may be partial, but sufficient in length to provide a complementary sticky end. In one embodiment, the overlap sequence within one PCR product (DNA fragment for assembly) and the overlap in the next neighbouring PCR product (DNA fragment for assembly) may be at least 2 base pairs in length. In another embodiment, the overlap sequence within one PCR product (DNA fragment for assembly) and the overlap in the next neighbouring PCR product (DNA fragment for assembly) may be at least 3 base pairs in length. In another embodiment, the overlap sequence within one PCR product (DNA fragment for assembly) and the overlap in the next neighbouring PCR product (DNA fragment for assembly) may be 3-6 base pairs in length. In another embodiment, the overlap sequence within one PCR product (DNA fragment for assembly) and the overlap in the next neighbouring PCR product (DNA fragment for assembly) may be 3-5 base pairs in length. In another embodiment, the overlap sequence within one PCR product (DNA fragment for assembly) and the overlap in the next neighbouring PCR product (DNA fragment for assembly) may be 4-5 base pairs in length. In another embodiment, the overlap sequence within one PCR product (DNA fragment for assembly) and the overlap in the next neighbouring PCR product (DNA fragment for assembly) may be 3-4 base pairs in length. In another embodiment, the overlap sequence within one PCR product (DNA fragment for assembly) and the overlap in the next neighbouring PCR product (DNA fragment for assembly) may be 4 base pairs in length.

[0108] PCR primers may be arranged to amplify the partially overlapping sections of template DNA in order to form the DNA fragments for assembly that would comprise complementary overhangs. The PCR reaction may add adaptor sequences containing the restriction recognition sequence (i.e. the universal adapter sequence, for example the restriction enzyme recognition sequence may comprise the same sequence as the restriction enzyme recognition sequence of the maintained composite element and/or truncating composite element) plus the sequence for the overhang that would be complementary to the overhang of the neighbouring/consecutive fragment for assembly. The overhang comprising the sequence that overlaps, for example by 4 bp, between consecutive/neighbouring fragments may be formed following digestion with the restriction enzyme (i.e. the overlap among PCR product is referring to the sequence, for example of 4 bp, that inside the whole adaptor sequence comprising the restriction enzyme recognition sequence).

[0109] The PCR primers may further provide the adapter sequences for the DNA fragments, which form the complementary overhang for ligation with the linearised methylated nucleic acids (such as the first linearised methylated nucleic acid, second linearised methylated nucleic acid or further linearised methylated nucleic acid) and formation of the intermediate vectors. The PCR primers may further provide a restriction enzyme recognition sequence that is arranged to direct the restriction enzyme to cut the PCR product to form the adapter sequences. The restriction enzyme recognition sequence provided by the PCR primers may be a restriction enzyme recognition sequence. The restriction enzyme recognition sequence may comprise the same sequence as the restriction enzyme recognition sequence of the maintained composite element and/or truncating composite element.

[0110] In one embodiment, the adapted middle DNA fragment comprises a region of overlapping native sequence that is the same sequence as a native overhang sequence provided in a consecutive/neighbouring DNA fragment intended for ligation. For example, where neighbouring/consecutive DNA fragments for assembly with each other are encoded from a template, they may each comprise an overlapping/same sequence region from the template, which would form the complementary native overhangs between the two neighbouring/consecutive sequences in a subsequent ligation. In one embodiment, the adapted middle DNA fragment comprises two regions of overlapping native sequence, that are arranged to form the native-overhangs of the middle DNA fragment once cut by the recognising restriction enzyme.

[0111] The method may further comprise the step of providing a linearised destination vector for insertion of the assembled DNA fragments. The linearised destination vector may comprise respective overhang sequences that are complementary to the maintained overhangs of the assembled DNA fragment. The overhang sequences of the linearised destination vector may comprise a first overhang that is complementary to the maintained-overhang sequence of the first adapted DNA fragment and a second overhang that is complementary to the second the maintained-overhang sequence of the second adapted DNA fragment.

[0112] The linearised destination vector may be provided by cutting a circular destination vector with the restriction enzyme(s) that are arranged to provide the same complementary overhangs as the assembled DNA fragments. For example, the linearised destination vector may be provided by cutting a circular destination vector with the restriction enzyme(s) that recognise the restriction enzyme recognition sequences of the maintained and/or truncating composite element. The linearised destination vector may be a cloning vector.

[0113] In one embodiment, the maintained composite element comprises the same sequence in all intermediate vectors that comprise the maintained composite element. In one embodiment, the truncated composite element comprises the same sequence in all intermediate vectors. In one embodiment, the maintained composite element comprises the same restriction enzyme recognition sequence as the truncated composite element. In one embodiment, the restriction enzyme recognition sequences of the maintained composite elements and/or the truncated composite elements of the intermediate vectors are the same. In particular the same restriction enzyme species may be used for restriction of the intermediate vectors, and optionally the destination vector.

[0114] The vectors used in the scarless assembly method of the invention may be high copy number vectors. For example the first and/or second linearised methylated nucleic acid may comprise a linearised methylated high copy number vector.

[0115] In one embodiment, the DNA assembly method of the invention is carried out in a single composition (i.e. so called “one-pot” process). For example, the DNA assembly process (including digestion with restriction enzyme and ligation) may be carried out in a single composition containing the restriction enzyme and DNA ligase using circular insert plasmids or linearized insert fragments and circular intermediate and/or destination vectors, or linearized versions thereof.

[0116] In one embodiment the methylation of the nucleic acid is carried out in a bacterial strain that is modified to expresses the methylase that recognises the methylase recognition sequence. In one embodiment the methylation of the nucleic acid is carried out in vitro.

[0117] According to another aspect of the invention, there is provided a modified bacterial strain that is modified to express a DNA methylase described herein.

[0118] The modified bacterial strain that is modified to express a DNA methylase may be an E. coli strain. The modification may comprise insertion of the methylase gene in the arsB locus of E. coli genome. The modified bacterial strain that is modified to express a DNA methylase may be formed by assembly of a vector with a methylase expression cassette followed by an antibiotic selection cassette, such as a zeocin antibiotic selection cassette, and flanked by homologous sequence from the arsb gene of E coli, followed by PCR using this as a template to generate linear DNA containing the above element, and recombineering with this fragment followed by selection with the antibiotic, such as zeocin, to generate bacteria strains with the methylase expression cassette and selection marker stably inserted into the arsB locus of E. coli genome.

[0119] According to another aspect of the invention, there is provided the use of a modified bacterial strain that is modified to express a DNA methylase described herein, for manufacturing a nucleic acid molecule according to the invention.

[0120] The modified bacterial strain may be E. coli.

[0121] According to another aspect of the inventions, there is provided a composition comprising the nucleic acid according to the invention. The composition may comprise buffer.

[0122] According to another aspect of the inventions, there is provided a kit comprising one or more nucleic acids according to the invention herein.

[0123] The kit may further comprise a restriction enzyme and/or a ligase, such as T4 DNA ligase. Additionally or alternatively, the kit may comprise a modified bacterial strain that is modified to express a DNA methylase according to the invention herein and/or a DNA methylase.

[0124] Additionally or alternatively, the kit may comprise one or more buffer solutions.

[0125] Additionally or alternatively, the kit may comprise antibiotics for clone selection.

[0126] One or more, or all, of the nucleic acid, buffer, bacterial strain, restriction enzyme, ligase, and methylase may be provided in a container, such as an Eppendorf tube.

[0127] According to another aspect of the invention, there is provided a host cell comprising nucleic acid according to the invention.

[0128] According to another aspect of the invention, there is provided the use of the nucleic acid according to the invention for assembling DNA fragments of interest, optionally wherein the use is in vitro.

[0129] Reference to the term “scarless” or “scarless assembly” herein is intended to refer to a sequence of DNA that has been assembled from multiple sequences, wherein the joint between the sequences does not comprise artefacts, such as unwanted base pairs, of the restriction and ligation of the DNA assembly process. For example, scarless assembly of DNA does not introduce additional sequence into the assembled DNA fragment. In some literatures it is also called seamless DNA assembly. In one example, an adapter sequence designed to provide complementary sticky ends to facilitate the joining of DNA fragments may be considered a “scar” between the joined sequences.

[0130] Reference to the term “adapter” herein is intended to refer to a sequence designed to provide complementary sticky ends to facilitate the joining of DNA fragments.

[0131] Reference to the term “overlap” or “overlapping” in the context of overlapping recognition sequences is intended to refer to at least part of the recognition sequence of one enzyme (for example any nucleotide other than N in a recognition sequence) being in a position of the nucleotide sequence that specifies the recognition sequence of another enzyme. (i.e. overlapping sequences share at least some common nucleotides).

[0132] Reference to the term “native” in the context of an overhang/sticky end sequence is intended to refer to the natural, non-adapted, sequence of the DNA fragment of interest to be inserted or joined to the nucleic acid. For example, the sequence will not be designed or amended relative to the sequence of the template DNA of interest. This is in contrast with overhangs determined by the vector sequence to facilitate DNA assembly, which might be introduced as a scar into the assembled sequence.

[0133] Reference to a “single assembled DNA molecule” is intended to refer to a single type of molecule, and is not intended to refer to the number of copies of the same molecule. In particular, in any given reaction or composition, there may be a plurality of copies of the single assembled DNA molecule.

[0134] Reference to “high copy number” plasmids/vectors may refer to those with a copy number of 100 or more copies per cell, including but not limiting to plasmids with replication of origins such as 1. mutated pMB1 replication origin from plasmid pUC plasmids (Vieira and Messing 1982. Gene 19:259-268; Vieira and Messing 1987. Methods Enzymol. 153:3-11; Messing 1983. Methods Enzymol. 101:20-78; Lin-Chao et al. 1992. Mol. Microbiol. 6:3385-3393, each of which are incorporated by reference herein); and 2. ColE1-derived replication origin from pBluescript plasmids—pBluescript II Phagemid Vectors, Instruction Manual, Catalog #212205, #212206. #212207 and #212208, Revision A.01, which is incorporated by reference herein). The replication origin carried by pbluescript is from pUC with a single nucleotide mutation. Particular guides on low and high copy plasmid/vector regulation can be found in Molecular Cloning A Laboratory Manual 3rd edition (2001), Joseph Sambrook and David W Russell, volume 1 page 1.4 Table 1-1 and volume 1 page 4.2 Table 4-1.

[0135] Reference to “low copy number” plasmids/vectors may refer to those with a copy number of less than 100 copies per cell, including but not limiting to plasmids with replication of origin such as 1. p15A replication origin from pACYC plasmids (Chang and Cohen 1978. J. Bacteriol. 134:1141-1156, which is incorporated by reference herein); 2. pSC101 replication origin from pSC101 plasmids (Stoker et al. 1982. Gene 18:335-341, which is incorporated by reference herein); 3. F replication origin from F plasmids (Kim et al. 1996. Genomics 34:213-218; Asakawa et al. 1997. Gene 191:69-79, each of which are incorporated by reference herein); 4. pMB1 replication origin from pBR322 plasmids (Bolivar et al. 1977. Gene 2:95-113, which is incorporated by reference herein); and 5. ColE1 replication origin from ColE1 plasmid (Kahn et al. 1979. Methods Enzymol. 68:268-280, which is incorporated by reference herein)

[0136] The skilled person will understand that optional features of one embodiment or aspect of the invention may be applicable, where appropriate, to other embodiments or aspects of the invention.

### BRIEF DESCRIPTION OF THE DRAWINGS

[0137] Embodiments of the invention will now be described in more detail, by way of example only, with reference to the accompanying drawings.

[0138] FIG. 1. Identification of methylases that block overlapping methylation/restriction sites

[0139] A. Diagram of overlapping methylation/restriction sites for the initial screening. Restriction enzyme recognition sites are boxed in solid lines. The adhesive end generated by the restriction enzyme is shown by a solid line. Methylation enzyme recognition sites are boxed in dashed lines, and methylated bases are in bold font. All the methylases listed modify N6-adenine, except M.SacI and M.AspJHL3I, which modify C5-cytosine and N4-cytosine respectively.

[0140] B. Experimental designs to test blocking of overlapping methylation/restriction sites by in vivo methylation. For each methylase/restriction enzyme combination tested, the test contains plasmid a head-to-head overlapping methylation/restriction site and a nonmethylatable restriction site. Restriction digest of test plasmid prepared from normal strain would result in restriction at both sites, and releases a ˜600 bp fragment from the ˜4.3 kb vector backbone. Restriction digest of test plasmid prepared from methylase-expressing strain would result in a single ˜4.9 kb band, due blocking of overlapping methylation/restriction sites by in vivo methylation. The restriction sites of test plasmid for each restriction enzyme are shown, with the restriction site boxed in solid line, methylation sequence boxed in dashed line, and methylated bases in bold. The head-to-head arrangement of overlapping methylation/restriction site allows assaying of nickase activity in the same assay.

[0141] C. Agarose gel electrophoresis analysis of test plasmid for each overlapping methylase/restriction enzyme combination prepared in normal strain or strain expressing DNA methylase and digested with corresponding type IIS restriction enzymes. The combinations tested are BsaI with M.Osp807II (M.Osp) using test plasmid pMOP_BsaINC, BpiI with M2.NmeMC58II (M2.Nme) using test plasmid pMOP_BpiINC, and LguI with M.XmnI using test plasmid pMOP_LguINC. Test conditions are 60 fmol test plasmid digested using 5U BsaI or BpiI, or 2.5U LguI in 10 μl reaction at 37° C. for 1h. Result shows that each of the methylases tested results in successful blocking through in vivo methylation of a restriction site for the corresponding type IIS restriction enzyme when the methylase recognition site overlaps the restriction enzyme site. The data shown represents results from three independent experiments.

FIG. 2. BsaI-M.Osp807II based Metclo system

[0142] The donor plasmids contain DNA fragments to be assembled (Frag A-D) flanked by BsaI sites that generate compatible adhesive ends (labelled aaaa-eeee). The BsaI sites overlap with the M.Osp807II methylase recognition sequence. Donor plasmids were prepared from a normal strain that lacks M.Osp807II methylase activity. As a result the BsaI sites are not methylated and so the insert DNA fragments can be released by BsaI digestion. The assembly vector contains a LacZ selection marker flanked by head-to-head BsaI sites. The outside pair of BsaI sites closer to the vector backbone overlap with M.Osp807II methylation sequence, whereas the inside pair do not. Preparation of the assembly vector in M.Osp807II-expressing DH10B strain results in blocking of the outside pair of BsaI sites specifically. The LacZ fragment could still be released by BsaI through the action on the inside pair of BsaI sites. Following a one-pot reaction using BsaI and T4 DNA ligase, ligation among compatible adhesive ends results in ordered assembly of DNA fragments to the assembly vector backbone. The assembled fragment in the assembled plasmid is flanked by blocked BsaI sites refractory to BsaI digestion. Following transformation into normal strain that lacks M.Osp807II activity, methylation of the flanking restriction sites is lost, and the assembled fragment could be released by BsaI for next stage assembly.

[0143] FIG. 3. DNA assembly using Metclo vector containing functional DNA elements between the methylation-protectable restriction site and non-protectable restriction site.

[0144] A. Diagram showing assembly of a transcription unit for expression of a protein with three different domains (D1, D2, D3) using Metclo vector with the promoter element (Prom) and polyA signal (polyA) pre-embedded into the vector. Methylation-protected BsaI sites are boxed in solid line, functional BsaI sites in dotted line, and methylated bases in bold. XXXX and YYYY represents the adaptor sequence at 5′ and 3′end of the assembled DNA fragment (transcription unit) that could be released for next round of DNA assembly. They may or may not be different from the internal adaptor sequences (AATG, ACTA, ATCT and GCTT), because they are not involved in the assembly reaction.

[0145] B. Diagram showing assembly of the same transcription unit using Metclo with the promoter element and polyA signal provided in separate insert plasmids. XXXX and YYYY represents the adaptor sequence at 5′ and 3′end of the assembled DNA fragment (transcription unit) that could be released for next round of DNA assembly. They are different from the internal adaptor sequences.

[0146] FIG. 4. Principle of adhesive end switching using universal cloning vectors

[0147] A. Diagram of three types of universal assembly vectors.

[0148] B. Details of adhesive end switching process of universal cloning vectors through Metclo, using vector VL as an example. Functional type IIS restriction sites are boxed in solid line, blocked restriction sites boxed in dashed line, and methylated bases in bold.

[0149] C. Symbolic system for representation of the adhesive end switching process. u and v represents the universal adhesive ends CTCC and CGAG respectively. x and y represents the 4 bp sequence inside the universal adhesive ends defined by the sequence. Assembly using different vector types results in switching of different adhesive ends.

[0150] D. Adhesive end switching process as applied to multiple fragments assembly.

[0151] FIG. 5. Scarless DNA assembly using universal cloning vectors

[0152] A. The DNA fragment to be assembled carries no internal BsaI restriction sites. The aim of the assembly process is to generate a single assembled fragment that carries adhesive ends x and y defined by the ends of the fragment.

[0153] B. The sequence is first broken up digitally into 9 different fragments (fragments A-I) with 4 bp overlaps (a-h).

[0154] C. Adaptor sequences were then added to the fragments digitally, resulting in DNA fragments that could be trimmed by BsaI to generate fragments flanked by the universal adhesive ends u and v.

[0155] D. Synthesized double stranded DNA fragments were first cloned into specific universal assembly vectors to switch the adhesive ends depending on the position of the fragment in the next stage assembly.

[0156] E. Cloned fragments were assembled 3 per group into specific universal assembly vectors, with the vector type depending on the position of the assembled fragment in the next stage assembly.

[0157] F Final stage of assembly generates the fully assembled fragment with sequence-specified adhesive ends x and y.

[0158] FIG. 6. Advantage of Metclo based scarless universal assembly compared to Moclo based universal assembly

[0159] For multistage assembly using universal assembly vectors, the Moclo based system uses two different restriction enzymes (BsaI and BpiI) for consecutive stages, which requires different universal adaptors for a given block (CTCC for BsaI and AGAA for BpiI). In order to clone the fragments from different stages into universal assembly vectors, the 5′ end of the first block and the 3′ end of the last block in each subassembly needs to switch between different adaptor sequences depending on the enzyme used for the assembly. The illustration shows the change of the 5′ adaptor for the first block (block A) during 3 consecutive stages of assembly reaction, with BsaI sites boxed in solid line, and BpiI sites boxed in dashed lines. A very long adaptor needs to be added to the 5′ end of block A to cope with the switch of adaptors during the different stages of assembly. The adaptor is “chewed back” 4 bp after each stage of assembly, so the length of the adaptor sequence depends on the number of the stages. The design based on Metclo is much simpler, because it uses a single enzyme BsaI for different stages of assembly. Here nonmethylatable BsaI sites are boxed in solid line, and BsaI sites blocked by methylation boxed in dashed line. The universal adaptor sequence CTCC at the 5′ end of the first block (block A) can be used for different stages of assembly. There is no need to switch adaptor sequence for the outer blocks. As a result the adaptor design for the initial sequence is much simpler.

[0160] FIG. 7. DNA assembly using Metclo. The figure illustrates the assembly of four DNA fragments (Fragments A, B, C and D) into a single DNA fragment (Fragment ABCD) through two cycles of Metclo using a single type IIS restriction enzyme. Stage 1 and Stage 2 are effectively the same process with progressively larger inserts. In Stage 1, the insert donor plasmids contain insert fragments (Fragments A, B, C or D) flanked by methylatable type IIS restriction sites that generate compatible adhesive ends. Preparation of insert plasmids in normal E. coli strains, which lack the appropriate site-specific methylase, results in insert fragments releasable by the type IIS restriction enzyme. The assembly vector contains the negative selection marker LacZα flanked by a purposely designed head-to-head configuration of type IIS restriction sites. The inside pair of the restriction sites are designed to be nonmethylatable, but the outside pair are methylatable by a site-specific methylase because the restriction enzyme recognition sequence overlaps with the methylase recognition sequence. Preparation of the assembly vector in E. coli strains expressing the corresponding methylase leads to selective methylation of the outside pair of methylatable restriction sites, and digestion with the type IIS restriction enzyme generates a vector backbone that retains the outside pair of methylated type IIS restriction sites. Ligation of the insert fragments with the vector backbone generates correctly assembled plasmid refractory to restriction by the type IIS restriction enzyme. All of the other unwanted fragments including the vector backbone of the insert plasmid and the LacZα fragment from the assembly vector contain active type IIS restriction sites, which are sensitive to restriction by the enzyme. This scheme enables a one-pot assembly reaction that combines the restriction and ligation step because the reaction favors generation of the correctly assembled plasmid. Transformation of the assembly reaction into a normal E. coli strain, which lacks the appropriate site-specific methylase, effectively results in demethylation of the methylated type IIS restriction sites flanking the assembled fragment in the assembled plasmid. In Stage 2, the assembled inserts (Fragments AB and CD) can then be used for a subsequent round of Metclo assembly into a larger fragment (Fragment ABCD).

[0161] FIG. 8. Level jumping: scheme for modification of DNA using components from different levels of assembly. The diagram shows the scheme for assembly of two DNA fragments (Fragments A and B) by the standard Metclo scheme and subsequent modification of the assembled fragment (Fragment AB) using a third fragment (Fragment C). The initial fragments used (Fragments A, B and C) are of the same level in the assembly hierarchy, in the sense that they carry the same antibiotic selection marker. The modification step modifies an existing fragment (Fragment AB) using a fragment (Fragment C) from a different level of assembly, hence “level jumping”. The modified fragment (Fragment ABC) carries the same adhesive ends as the starting fragment (Fragment AB), and an antibiotic selection marker (M3) different from both level 1 and level 2 blocks (M1 and M2). Therefore, the new fragment ABC can be used for the next level of DNA assembly using selection marker M1 in place of fragment AB. The maintenance of the adhesive ends during the modification step is achieved through the use of a special arrangement of head-to-head type IIS restriction sites (to the right of the LacZα fragment during the modification step), in which the inside nonmethylatable type IIS restriction site generates an adhesive end that is compatible with the modification fragment to be inserted (Fragment C), and the outside methylatable type IIS restriction site generates an adhesive end identical to the end of the DNA fragment to be modified (the right-hand end of Fragment AB in the diagram). The modification step is not possible with the standard Moclo approach using two type IIS restriction enzymes, because DNA fragments from consecutive levels of assembly would then need to be released by two different restriction enzymes, each of which needs to be different from the enzyme used for next level of DNA assembly after the modification step. The level-jumping modification scheme is useful for insertion of functional genetic elements such as transcription units into an existing assembly pipeline without changing the higher level assembly design, to maximize the reusability of existing sequence-verified DNA parts.

[0162] FIG. 9. Level insertion: scheme for assembly of DNA through an intermediate assembly stage. The diagram shows the scheme for assembly of four DNA fragments (Fragments A, B, C and D) into a single fragment (Fragment ABCD) through an intermediate stage of DNA assembly (Level insertion). In contrast to the standard Metclo assembly scheme (FIG. 3) that assembles the four fragment in a single reaction, this scheme involves an intermediate assembly stage by sub-assembly of fragments B and C into an intermediate assembly vector that carries a selection marker (M3) different from the one for level 1 DNA inserts (M1 carried by fragments A, B, C and D) and for level2 assembled DNA fragment (M2 carried by fragments ABCD). The level-insertion sub-assembly scheme offers more choices in the routes of DNA assembly, and increases the reusablity of intermediate assembled DNA fragments.

[0163] FIG. 10. Linear addition: scheme for assembly vector construction using BsaI-based Metclo. The diagram shows the scheme for linear addition of DNA parts for construction of assembly vectors carrying existing functional genetic elements (Fragments A and D). Starting with an assembly vector that carries a nonselectable stuffer DNA fragment flanked by nonmethylatable type IIS restriction sites, two DNA fragments (Fragments A and D) are first assembled with a LacZα selection marker into this vector. The LacZα selection marker is flanked by a specially designed head-to-head arrangement of type IIS restriction sites, such that the inside sites are methylatable and the outside sites are not. Preparation of the LacZα insert plasmid in an E. coli strain expressing the corresponding methylase results in selective blocking of the inside pairs of methylatable type IIS restriction sites. One-pot assembly of the LacZα insert with other inserts prepared from the normal E. coli strain (Fragments A and D) results in an assembled DNA fragment refractory to restriction by the type IIS restriction enzyme used for DNA assembly. Transformation of the assembled DNA into a normal E. coli strain that lacks the corresponding methylase activity results in demethylation of the methylatable type IIS restriction sites flanking the LacZα fragment. As a result, the assembled DNA can then be used as an assembly vector for addition of new DNA fragments (Fragments B and C) in place of the LacZα selection marker in the next round of DNA assembly. The net outcome is linear addition of DNA fragments into the assembly vector (Fragments A and D, then fragments B and C). The scheme is useful for construction of final stage assembly vectors that carry common functional genetic elements, such as mammalian selection markers.

### EXAMPLE 1—METHYLATION ASSISTED MODULAR ASSEMBLY USING A SINGLE RESTRICTION ENZYME (METCLO)

### Introduction

### Overview of Metclo

[0164] Here we developed an improved type IIS restriction enzyme-based hierarchical assembly method named Metclo, which reduces the number of restriction enzymes used to one. We achieved this by adding a pair of specific type IIS restriction sites for the same enzyme used for assembly into the assembly vector, which are selectively blocked by DNA methylation. Transformation of assembled DNA into normal strains that lack the specific methylase unblocks the flanking restriction sites, resulting in plasmids carrying the assembled fragment which can be released using the same type IIS restriction enzyme and then used for a subsequent round of DNA assembly. We tested a number of methylases for their abilities to block overlapping methylation/restriction sites for three commonly used commercially available type IIS enzymes BsaI, BpiI and LguI, and identified suitable methylases for each of them, namely M.Osp807II (for BsaI with overlapping sequence GACNNGGTCTCN\hat{ }NNNN), M2.NmeMC58II (for BpiI with overlapping sequence GAAGACGC\hat{ }NNNN), and M.XmnI (for LguI with overlapping sequence GAAGCTCTTCN\hat{ }NNN, methylated base or opposite base is underlined, additional bases required to specify methylase activity in bold, restriction enzyme recognition sequence in italic; all three modifications are m6A N6-methyladenine). We developed E. coli strains carrying chromosomal copy of expression cassettes for constitutive expression of these methylases, and showed that DNA propagated in these strains is refractory to digestion by the restriction enzyme when the restriction site overlaps with the corresponding methylase recognition sequence. We then built proof-of-principle Metclo systems for each pair of methylase/restriction enzyme for assembly of four fragments into a single fragment, which could be released by the same restriction enzyme. Finally, we demonstrated the utility of the M.Osp807II/BsaI-based Metclo system for hierarchical assembly a 218 kb DNA from 28 ×7.7 kb DNA in 2 stages using BsaI.

### Materials and Methods

### Plasmid Construction

[0165] Plasmids were constructed by standard restriction enzyme- and ligation-based cloning techniques. DNA fragments for cloning were generated by PCR or by gene synthesis (IDT or Invitrogen). For proof of principle modular assembly of ˜1 kb DNA from 4 fragments, the modular assembly acceptor vector backbone is based on ampicillin-resistant Moclo vector pICH47732 (available from Addgene, and described in A modular cloning system for standardized assembly of multigene constructs. Weber E, Engler C, Gruetzner R, Werner S, Marillonnet S. PLOS One. 2011 Feb. 18; 6(2):e16765. doi: 10.1371/journal.pone.0016765) and the donor plasmid backbone based on a kanamycin-resistant vector built by replacing the ampicillin-resistant gene in pICH47732 with a kanamycin-resistant gene. For hierarchical assembly of ˜200 kb DNA from 28 fragments, the modular assembly acceptor vectors are based on gentamicin or kanamycin-resistant low copy BAC vector backbone with F replication origin, and the donor plasmid backbone is based on kanamycin-resistant low copy vector backbones with p15A or F replication origin. Plasmids for methylase overexpression were built based on a kanamycin-resistant low copy BAC vector backbone with F replication origin. The methylase genes were under the control of J23100 synthetic promoter, and flanked by a zeocin selection cassette as well as homologous sequences of the arsB locus to facilitate stable integration into the E coli genome by recombineering. Template plasmids for methylase assay are based on amplicillin-resistant pICH47732.

### Generation of Methylase Expressing Strains

[0166] E. coli strains with stable expression of specific methylases were generated by recombineering. Briefly, DNA fragments containing the methylase gene, zeocin selection marker and flanking arsB homologous sequences were generated by PCR using the corresponding methylase expressing BAC plasmid as template. The fragments were used for lambda red recombineering in DH10B cells followed by zeocin selection to insert the methylase expression cassette into the arsB locus. Clones with correct chromosomal insertions were verified by PCR and sequencing. The methylase expressing strains can be stably maintained without antibiotic selection.

### Modular Assembly

[0167] For proof of principle modular assembly of ˜1 kb DNA from 4 fragments, assembly reactions were set up using 60 fmol each of donor plasmids prepared from DH5alpha cells, 60 fmol assembly vector prepared from DH10B strains expressing compatible methylase, 1,000U T4 DNA ligase (NEB), and 5U BsaI (NEB) or BpiI (Fermentas) or 2.5U LguI (Fermentas) in 20 μl 1×T4 ligase buffer (NEB). The reaction condition was: 37° C. 15 min, followed by 45 cycles of 37° C. 2 min plus 16° C. 5 min, then 37° C. 20 min, and 80° C. 5 min. Assembled samples were transformed into DH5alpha chemical competent cells, and plated on LB plates with AIX selection (ampicillin 100 μg/ml, IPTG 100 μM, X-Gal 50 μg/ml) at 37° C. overnight. White colonies were expanded and screened by DNA sequencing.

[0168] For hierarchical assembly of ˜200 kb DNA from 28 fragments, the assembly was carried out in two stages. At stage 1, the fragments were assembled 7 per group using 15 fmol each of donor plasmids prepared from DH10B cells, 15 fmol assembly vector prepared from DH10B-M.Osp807II cells, 1,000U T4 ligase (NEB), and 5U BsaI (NEB) in 20 μl 1×T4 ligase buffer (NEB). The reaction condition was the same as described above. The assembled samples were then drop-dialyzed against 50 ml dH2O using 0.05 um cellulose filter (Millipore) at room temperature for 1h. 5 μl of dialyzed sample was transformed into 25 μl NEB-10beta eletrocompetent cells by electroporation at 0.9 kV 100Ω 25 μF, using Gene Pulser and 1 mm electroporation cuvettes (Biorad). Following electroporation, cells were recovered by adding 1 ml LB medium and incubated at 37° C. 220 rpm for 1h. Cells were plated on LB plates with GIX selection (gentamicin 2.5 μg/ml, IPTG 100 μM, X-gal 50 μg/ml) at 37° C. overnight. White colonies were expanded and screened by restriction digestion using XhoI.

[0169] At stage 2, the ˜200 kb DNA was assembled using protocols similar to stage 1 with the following modifications: 30 fmol each of donor plasmids and 15 fmol assembly vector was used in the assembly reaction; following modular assembly and before the drop dialysis step, 10U BsaI was added to the assembly reaction for incubation at 37° C. for 45 min followed by heat inactivation at 80° C. for 5 min. Transformed cells were plated on LB plates with KIX selection (kanamycin 30 μg/ml, IPTG 100 μM, X-gal 50 μg/ml). White colonies were screened by PCR using primers detecting the junction between the second and the third 54 kb fragments (TACCCACGTGATTCACGCTG and ATCCTACAGACTCGCTGTGG). Selected PCR positive clones were screened by restriction digest using XhoI or BsaI with pulsed-field electrophoresis.

### Result

[0170] The Metclo system is based on the standard type IIS restriction enzyme-based one-pot DNA assembly system, and added an additional pair of type IIS restriction sites in the assembly vector backbone for release of the assembled DNA for next stage assembly. Unlike the Moclo system which uses restriction sites different from the type IIS enzyme used in the assembly process, Metclo uses the restriction sites for the same enzyme. To prevent the assembled plasmid from being cut by this enzyme in the one-pot assembly reaction, Metclo uses specific methylase to methylate the type IIS restriction sites overlapping with the methylase recognition sequences, in order to block these type IIS restriction sites in the vector backbone. The methylation is lost when the assembled plasmid is transformed into E. coli strains lacking the specific methylase, thus enabling the release of assembled fragment from the assembled plasmid by the same type IIS restriction enzyme used in the assembly reaction. The resulting Metclo system therefore allows hierarchical assembly of DNA fragments using one-pot reaction with a single type IIS restriction enzyme, among various applications.

[0171] The key to the Metclo system is the identification of suitable methylase to block type IIS restriction sites that overlap with the methylase recognition sequence in the vector backbone. There are several criteria for selection of suitable methylase. First of all, methylation of the overlapping methylation/restriction site must result in blocking the action of the type IIS restriction enzyme. The methylation process could occur by in vitro methylation of purified vector plasmid, or by propagating vector plasmid in strains that express the methylase in vivo. In vivo methylation is preferred due to the reduced cost and time in the vector preparation process. Secondly, the methylase recognition sequence must not be identical to or entirely enclosed by the type IIS restriction site; additional base pairs must be required to specify the action of the methylase on the overlapping methylation/restriction site. The reason for this requirement is because there are two pairs of type IIS restriction sites for the same enzyme in the assembly vector. One pair within the vector backbone need to be blocked by the methylase, whereas the other pair within the negative selection marker insert must not be blocked. If the methylase recognition sequence is identical to, or enclosed by the type IIS restriction site, all the restriction sites in the assembly vector for this particular type II restriction enzyme will be blocked by methylation, including the pair within the negative selection marker insert; the resulting methylated assembly vector won't be cut by the type IIS enzyme at all, therefore cannot be used for DNA assembly. Thirdly, additional base pairs to specify methylase activity should not overlap with the adhesive end sequence generated by the type IIS restriction enzyme. This will maintain maximum flexibility in design of adaptor sequence for DNA assembly.

[0172] We searched for methylases with predicted ability to block restriction sites for type IIS restriction enzymes BsaI, BpiI and LguI. These are common type IIS restriction enzymes used in type IIS-based assembly systems. We used a few extra criteria in addition to the ones listed above to choose candidate methylases for testing. We aimed to generate methylated plasmids by in vivo methylation, so the methylase should ideally be active at the growth temperature of E coli. We also preferred methylases that recognize longer sequences (5-6 bp), because with longer recognition sequences, fewer bases in the E coli host genome and assembly vector backbone would serve as methylation substrate by chance. This potentially increases the efficiency of methylation, and reduces the chance of adverse effect of heterologous DNA methylation on host gene function. In addition, we preferred single subunit methylases from type II restriction/modification systems that lack restriction activity towards unmethylated sequence to avoid potential problem of restriction during the vector construction step. Lastly, to increase the chance of methylation blocking the overlapping methylation/restriction sites, we preferred methylases that modify bases close to the middle of the restriction site.

[0173] Based on these criteria, we selected the following methylases for testing: M.Osp807II (GACNNGGTCTC m6A) for BsaI, M.Rsp7740I (TTCGAAGAC m6A) and M2.NmeMC58II (GAAGACGC m6A) for BpiI, and M.SacI (GAGCTCTTC m5C), M.AspJHL3I (GAGCTCTTC m4C) and M.XmnI (GAAGCTCTTC m6A) for LguI (methylated base or complementary base underlined). We screened methylase activity by preparing ColE-based (i.e. ColE-derived) high copy template plasmid carrying overlapping methylation/restriction sites in DH10B cells expressing the corresponding methylase under the J23100 constitutive synthetic promoter from a low copy BAC vector (low copy BAC vector backbone with F replication origin). This identified M.Osp807II (for BsaI), M2.NmeMC58II (for BpiI) and M.XmnI (for LguI) as suitable candidates for further analysis (FIG. 1A). We then integrated the methylase expression cassette with a zeocin selection marker into the arsB locus using lambda-red recombineering to generate stable strains overexpressing the methylase from a chromosomal copy (Microb Cell Fact. 2013 Jun. 24; 12:60. doi: 10.1186/1475-2859-12-60 (PMID 23799955)), and tested the ability of these methylases to block overlapping methylation/restriction sites in vivo. The test vector carries one restriction site that does not overlap with methylation sequence, thus permissible for restriction in both wild-type and methylase-expressing strain, and one site with two head-to-head type IIS restriction sites, both of which overlap with the corresponding methylation sequence and would, therefore, be blocked in the strain expressing the methylase. The head-to-head arrangement allows for assessment of nickase activity as well as double strand restriction activity in the same assay (FIG. 1B). Following 1h digestion of 60 fmol test plasmid (pMOP_BsaINC, pMOP_BpiINC and pMOP_LguINC) in 10 μl reaction using 5U (BsaI, BpiI) or 2.5U (LguI) enzyme at 37° C., DNA were analyzed by agarose gel electrophoresis with EtBr staining. The result shows that under test condition, the three methylases block restriction of the overlapping sites, as demonstrated by the lack of generation of ˜600 bp fragment (FIG. 1C).

[0174] We then developed proof-of-principle Metclo DNA assembly systems using these methylases for one-pot DNA assembly (FIG. 2 shows BsaI-MOsp807II as an example). In these systems, the donor DNA inserts to be assembled are flanked by overlapping methylation/restriction site. Because the donor plasmids containing the DNA inserts to be assembled are prepared in a normal E coli strain that lacks the corresponding methylase, the restriction site is not blocked and the donor insert could be released by the enzyme in the assembly reaction. The assembly vector carries a different selection marker from the donor plasmid, and a LacZ selection marker flanked by head-to-head typeIIS restriction sites. For each head-to-head site, the two type IIS restriction sites generate the same adhesive end. The outside site close to the vector backbone overlaps with the methylation sequence, and the inside site close to the LacZ insert does not. The destination vectors are prepared from an E coli strain that expresses the corresponding methylase. As a result, only the inside typeIIS sites are functional in the assembly reaction. During the reaction, the LacZ insert is released from the vector backbone due to action of enzyme on the inside typeIIS site; ligation of the donor insert with the destination vector results in typeIIS restriction sites within from the destination vector backbone, which is blocked by methylation; religation of the freed LacZ insert with the destination vector backbone results in regeneration of the head-to-head typeIIS site, which is sensitive to restriction due to the inside site not blocked. As a result, the reaction favors ligation of donor fragments to destination vector backbone. The moclo reaction is then transformed into normal E coli strain that lacks the specific methylase activity for screening for LacZ expression using LB plates containing IPTG and X-Gal. The white colonies that lack LacZ activity should contain successfully assembled plasmids. The assembled DNA fragment have flanking type IIS restriction sites that overlap with methylase recognition sequences, which are identical to the donor vector. As a result, this allows a further round of modular assembly at the next level using the same restriction enzyme and so on for multiple rounds as required.

[0175] We tested the systems for the three enzymes for assembly from four fragments (Table 1). The donor vectors are kanamycin-resistant, and destination vectors ampicillin-resistant. Destination vectors were prepared from corresponding methylase-expressing strains. Following selection, 8 white colonies were picked for miniprep and analyzed by Sanger sequencing. Sequencing result shows that 100% (8/8) of clones are correct for each of the three Metclo systems (Table 1). This confirms the utility of Metclo for modular assembly using a single restriction enzyme such as BsaI, BpiI or LguI.

[0176] To further explore the utility of Metclo for hierarchical assembly of large DNA constructs, we assembled a 218 kb DNA fragment from 28×7.7 kb fragments using BsaI restriction enzyme in two stages. In stage one, 28 DNA fragments of 7.7 kb which were free of BsaI sites were assembled 7 per group into 4 pieces of 54 kb fragments using BsaI-based Metclo system. In stage two, the 4 pieces of 54 kb fragments were assembled into a single 218 kb fragment. The final 218 kb fragment is composed of non-repetitive sequence with ˜48% GC content. Restriction digest shows a ˜50% success rate for stage 1 assembly (2/4 to 3/4 clones correct), and ˜20% for stage 2 assembly (14 out of 27 PCR verified, of which 3 out of 8 verified by restriction digest) (Table 2). This confirms that the Metclo system can be used for hierarchical assembly of large DNA construct using a single type IIS restriction enzyme.

### Discussion

[0177] Here we present Metclo, a modified type IIS restriction enzyme based DNA assembly system for one-pot assembly of DNA using common type IIS restriction enzymes such as BsaI, BpiI or LguI, that generates assembled DNA releasable by the same restriction enzyme. This enables hierarchical assembly of large DNA constructs using a single type IIS restriction enzyme. The system uses methylase-overexpressing strains during the vector preparation step for in vivo methylation of overlapping methylation/restriction sites to block selective restriction sites in the vector. The assembly process is the same as the type IIS DNA assembly systems through the use of one-pot reaction, thus preserves the simplicity of the existing systems. The part preparation and transformation steps utilize normal strains similar to the standard Moclo system, allowing the use of routine cloning strains for DNA assembly, similar to the current type IIS assembly systems.

[0178] The Metclo system has a number of advantages over the existing type IIS restriction enzyme-based hierarchical DNA assembly systems. Firstly, the Metclo approach reduces the burden to remove internal restriction sites during component part construction. Compared with the standard Moclo system that uses two or more enzymes, the BsaI- and BpiI-based single enzyme Metclo system uses a 6 bp cutter that reduces the frequency of forbidden restriction sites from 1 per ˜1 kb to 1 per ˜2 kb for random DNA with 50% GC content, and the LguI-based Metclo system uses a 7 bp cutter that reduces the frequency further to 1 per ˜8 kb.

[0179] Metclo improves the flexibility of the hierarchical type IIS assembly system. Because assembled DNA fragments from different stages of assembly can be released by the same restriction enzyme, with appropriate design of adaptors and choice of antibiotic resistant vector, the system potentially allows design of several assembly schemes not achievable using the existing system. These include level jumping—the assembly of DNA using parts from different stages of assembly—and level insertion—the assembly of DNA fragments through an intermediate assembly stage. These schemes are useful for modification of large DNA constructs using existing parts, and for subassembly of complex parts such as multi-part open reading frames for added reusability.

[0180] Additional schemes could also be devised for linear addition of DNA parts during the assembly process. For example, DNA parts containing selection markers flanked by internal methylation-blocked type IIS restriction sites could be used during DNA assembly. The assembled plasmid could then be used as an assembly vector for insertion of additional DNA parts in place of the selection marker in the next stage assembly. This is particularly useful for construction of common assembly vectors containing functional modules.

[0181] Metclo also increases the exchangeability of parts from different assembly standards. Independent development of part library and assembly standards lead to assembly systems that use different type IIS restriction enzymes. For example, for plant biology, Moclo uses BsaI/BpiI (and Esp3I), Goldenbraid uses BsaI and BsmBI (and BtgZI); for E. coli, Ecoflex uses BsaI/BsmBI, CIDAR uses BsaI/BpiI. This place constraints on exchangeability of parts among different collections. The Metclo system that uses a single type IIS restriction enzyme is compatible with any system that uses that restriction enzyme. In particular, the BsaI-based system is compatible with all the existing systems that use BsaI. Given that BsaI has been used in most of the type IIS restriction enzyme-based hierarchical modular assembly systems to date (ACS Synth Biol. 2016 Oct. 21; 5(10):1059-1069 (PMID 27096716); ACS Synth Biol. 2016 Jan. 15; 5(1):99-103. doi: 10.1021/acssynbio.5b00124 (PMID 26479688; ACS Synth Biol. 2015 Sep. 18; 4(9):975-86. doi: 10.1021/sb500366v (PMID 25871405); and PLOS One. 2011 Feb. 18; 6(2):e16765. doi: 10.1371/journal.pone.0016765 (PMID 21364738), the BsaI-based Metclo system has potential to be used as a standard for modular assembly that is compatible with most of the existing part libraries.

[0182] There are DNA assembly systems that use DNA methylation to block internal type IIS restriction sites during the assembly process. For example, the TNT assembly system (Sci Rep. 2016 Jan. 13; 6:19278. doi: 10.1038/srep19278 (PMID 26758940)) uses M.TaqI to methylate overlapping Earl recognition site, which results in an assembly system using 7 bp cutter LguI (GCTCTTCN\hat{ }NNN) and 6 bp cutter Earl (CTCTTCN\hat{ }NNN) both giving 3 bp sticky ends, thus requiring removal of a single 6 bp sequence from DNA parts (CTCTTC). However, because the M.TaqI recognition sequence (TCGA) that overlaps with the Earl restriction site intrudes the adhesive end sequence (CTCTTCG\hat{ }ANN), the system places limitations on the design of adaptors, thus could only assembly fragments three at a time, and could not be expanded to an LguI-only assembly system. As another example, Greengate used methylated linker DNA as parts during the DNA assembly process to introduce new BsaI sites for subsequent rounds of assembly. The resulting system however could only be used for linear addition of DNA parts, thus limiting the use of the system to construction of DNA constructs with a small number of transcription units. Compared to these systems, the Metclo system, with the use of in vivo methylation of overlapping methylation/restriction site outside the adaptor sequence, preserves the advantage of the hierarchical multiplicative assembly scheme of the Moclo system, and maintains the freedom of choice of adaptor sequences for DNA assembly. In practice, similar result could be achieved by adding methylated linker DNA as the first and last parts during the assembly process. However, this would increase the number of parts in the assembly by two, which reduces success rate of assembly compared to the in vivo vector methylation approach in the Metclo system.

[0183] In summary, the Metclo system, through the use of in vivo methylation to block specific type IIS restriction sites within the assembly vector, enables hierarchical assembly of large DNA fragments using a single type IIS restriction enzyme. The system simplifies the existing type IIS restriction enzyme-based assembly method and increases the flexibility of design of assembly schemes. The BsaI-based Metclo system in particular is compatible with all the existing part libraries that uses BsaI, and could be used as a standard type IIS-based assembly system.

TABLE 1
Proof of principle assembly of DNA fragment using BsaI, BpiI or Lgui-based Metclo systems
Table 1. Proof of principle assembly of DNA fragment using BsaI, BpiI or Lgui-based Metclo systems

| Plasmid | Vector | Inserts | Methylase | Enzmye | Size | Success rate |
|---|---|---|---|---|---|---|
| pMXP_test | pMXK2_A4E | pMXP_FragA pMXP_FragB pMXP_FragC pMXP_FragD | M.Osp807II | BsaI | 908 bp | 8/8 |
| pMYP_test | pMYK2_A5E | pMYP_FragA pMYP_FragB pMYP_FragC pMYP_FragD | M2.NmeMC58II | BpiI | 1152 bp | 8/8 |
| pMZP_test | pMZK2_P6T | pMZP_FragA pMZP_FragB pMZP_FragC pMZP_FragD | M.Xmnl | LguI | 1149 bp | 8/8 |

TABLE 2
Hierarchical assembly of a 218 kb DNA fragment using BsaI-based Metclo system

| | | | | Success |
|---|---|---|---|---|
| Plasmid | Vector | Inserts | Size | rate |
| pMXBG_3A1 | pMXBG_A7I | pMOLK_2A1 pMOLK_2B1 pMOLK_2C1 pMOLK_2D1 pMOLK_2E1 | 54 kb | 3/4 |
| | | pMOLK_2F1 pMOLK_2G1 | | |
| pMXBG_3I1 | pMXBG_I7G | pMOLK_2I1 pMOLK_2A2 pMOLK_2B2 pMOLK_2C2 pMOLK_2D2 | 55 kb | 2/4 |
| | | pMOBK_2E2 pMOLK_2F2 | | |
| pMXBG_3G1 | pMXBG_G7F | pMOLK_2G2 pMOLK_2I2 pMOLK_2A3 pMOLK_2B3 pMOLK_2C3 | 54 kb | 2/4 |
| | | pMOBK_2D3 pMOLK_2E3 | | |
| pMXBG_3F1 | pMXBG_F7E | pMOLK_2F3 pMOLK_2G3 pMOLK_2I3 pMOLK_2A4 pMOLK_2B4 | 54 kb | 2/4 |
| | | pMOLK_2C4 pMOLK_2D4 | | |
| pMXBK_4A1 | pMXBK_A7E | pMXBG_3A1 pMXBG_3I1 pMXBG_3G1 pMXBG_3F1 | 218 kb | 3/8* |

*14/27 PCR positive, of which 3/8 verified by restriction digest

### Example of an Insertional Composite Element

[0184] In another scenario, longer DNA sequences could be included between the methylation-protectable restriction site and the opposing non-protectable restriction site in the assembly vector, such that following DNA assembly, these sequences will be added into the 5′ or 3′ end of the assembled DNA plasmid. This design is convenient for adding common elements to the assembled plasmid by using specialized vectors.

[0185] An example is shown in FIG. 3 for assembly of a transcription unit for expression of a protein with three different domains, starting from insert plasmids containing the three individual domains D1, D2 and D3 using BsaI-based Metclo. Figure A shows the Metclo assembly using a special Metclo vector containing a promoter between the methylation-protectable restriction site and the non-protectable restriction site at 5′ of the LacZ (discard sequence), and a polyA element at 3′ (“pre-embedded vector”. Metclo using this special pre-embedded vector allows the assembly of the three domains into a transcription unit in a one-pot reaction from three insert plasmids, and the assembled transcription unit consisting a promoter, a coding region (D1 D2 and D3), and a polyA signal could be released from the assembled plasmid for next round of Metclo assembly. This is in contrast with the standard Metclo using “maintained composite element”, whereas the transcription unit has to be assembled from 5 different insert plasmids (Figure B). In the figures XXXX and YYYY represents the adaptor sequence at 5′ and 3′end of the assembled DNA fragment (transcription unit) that could be released for next round of DNA assembly. For DNA assembly using “pre-embedded vectors”, these two adaptor sequences can be the same as internal adaptor sequences because they are not involved in the one pot three fragment assembly. For DNA assembly using standard Metclo vector though, XXXX and YYYY adaptor sequences must be different from the internal adaptor sequences (AATG, ACTA, ATCT and GCTT). In addition, the method using pre-embedded vectors (Figure A) has advantage that less number of DNA parts need to be assembled in a single reaction, which increases the rate of success. The disadvantage is that the specialized vector is more difficult to prepare.

### EXAMPLE 2—SCARLESS DNA ASSEMBLY (SCARLESS METCLO)

[0186] A unique application of Metclo is a system for scarless hierarchical assembly of large DNA construct using a limited set of universal cloning vectors. Type IIS based DNA assembly using universal vectors relies on a specific arrangement of head-to-head type IIS restriction sites in the assembly vector that changes the adhesive end of the cloned fragment. Scarless assembly is achieved by using these universal vectors to generate assembled DNA fragments with adhesive ends (scars) defined by the DNA fragment for subsequent round of assembly, which buried the assembly scar into the assembled sequence. The use of the Metclo system allows maintenance of the same universal adhesive ends for the outer fragments during different stages of hierarchical assembly. A combination of these three features results in a universal scarless assembly system.

[0187] Here we describe the principles of scarless Metclo assembly system using the BsaI restriction enzyme. The system relies on a set of three types of universal cloning vectors that change the adhesive ends of the cloned fragments (FIG. 4A). The three vector types are named VL, VM and VR. The vectors are designed to clone DNA fragments with adhesive end CTCC at 5′ end and CGAG at 3′ end could be cloned into the above vectors. The cloned fragment, once released by BsaI from the vector, will have different adhesive ends depending on the vector used. Vector VL is designed to keep the 5′ adhesive end, and change the 3′ adhesive end to the four bases inside the 3′ CGAG sequence; Vector VR to keep the 3′ adhesive end, and change the 5′ adhesive end to the four bases inside the 5′ CTCC sequence; Vector VM to change both ends to the four bases inside. In this way a set of universal vectors could be used to generate DNA fragments with adhesive ends defined by the insert sequence.

[0188] The detail of adhesive end switching process is described in FIG. 4B using vector VL as an example. When the vector is prepared in methylase-expressing competent cells, methylation of adenine (bold) due to overlapping methylase recognition sequence results in blocking of the outside BsaI sites (boxed in dotted line), where the inside BsaI sites (boxed in solid line) are available to remove the LacZ insert. Note that the left arm of vector VL is similar to standard Metclo, that both the outside and inside BsaI sites give rise to the same adhesive end CTCC. The right arm of VL however is different that the adhesive end CGAG generated by the inside BsaI site overlaps with the outside BsaI site. The donor DNA carries an insert that could be released by flanking BsaI sites with compatible universal adhesive ends CTCC and CGAG. The double strand insert carries 4 bp sequence XXXX on the 5′ end and YYYY on the 3′ end inside the universal adhesive end. Following Metclo assembly of the donor DNA into vector VL, the resulting plasmid carries the corresponding insert that could be released by the flanking BsaI sites (boxed in solid line) in the vector. The released fragment would carry a 5′ adhesive end CTCC identical to the one used for cloning, but the 3′ adhesive end would be YYYY as defined by the insert sequence, which may be different from the universal 3′ adhesive end CGAG. In this way, vector VL switches the right hand adhesive end of the cloned fragment from universal adhesive end CGAG to the sequence-defined adhesive end YYYY.

[0189] The conversion process using the three types of universal cloning vectors could be described using a simple symbolic representation system (FIG. 41C). Here we use letter u to represent the 5′ universal adhesive end CTCC, and letter v to represent the 3′ universal adhesive end CGAG. x and y represents the 4 bp sequence at the 5′ and 3′end of the insert fragment inside the universal adhesive end. Insert (u,v) represents a plasmid carrying insert fragments flanked by BsaI sites that generate adhesive ends u and v. Assembly reaction with different vectors results in different adhesive ends being converted.

[0190] The same set of universal vectors could be used to assemble multiple fragments with compatible adhesive ends, as long as the 5′ end of the first fragment and the 3′ end of the last fragment have universal adhesive ends u and v (FIG. 4D). The assembled fragment carries different adhesive ends depending on the type of assembly vector used. Assembly of fragments into vector VL keeps the 5′ universal adhesive end, and converts the 3′ end into the internal 4 bp. Assembly into vector VM converts both ends, and assembly into vector VR converts the 5′ end and keeps the 3′ universal adhesive end. Note the fragment assembled into vector VL resembles fragment A that it carries only 5′ universal adhesive end u; the fragment assembled in vector VM resembles fragment B; and the fragment assembled in vector VR resembles fragment C. Therefore the process is self-similar, such that the assembled fragments could be used for next round DNA assembly using the same principle depending on the position of the fragment in the assembly order. This enables hierarchical scarless assembly of large DNA constructs using universal cloning vectors.

[0191] The whole process of hierarchical scarless assembly of DNA is described in FIG. 2, using DNA assembly from 9 fragments in 2 stages as an example. Starting with a DNA sequence free of internal BsaI sites, with the 4 bp at 5′ end named x, and 3′end named y, the aim is to assemble the DNA from 9 fragments into a single fragment that once released from the assembled plasmid carries adhesive ends x and y (FIG. 5A). The DNA sequence is first broken up into 9 fragments named A-I with 4 bp overlapping sequences, with the overlapping sequences named a-h (FIG. 5B). The positions of 4 bp overlaps could be chosen freely, as long as they are different to universal adhesive ends u and v, and to each other within each subassembly reaction. For the current set up, the following pairs of 4 bp overlaps should be different within each pair: (a,b), (d,e), (g,h) and (c,f). Appropriate adaptor sequences were added to the ends of sequences of fragments A-I, and double DNA synthesized by gene synthesis or PCR, so that following restriction digest with BsaI, the double stranded DNA could be trimmed into fragments A-I carrying universal adhesive ends u and v (FIG. 5C). These double stranded synthetic DNA fragments could then be cloned into appropriate types of universal cloning vectors to change the adhesive end of the fragment depending on the position of the fragment in the next stage assembly (FIG. 5D). Fragments A, D and G, which will locate at the 5′ end position in the next round of assembly, are cloned into vector type VL; B, E, H in the middle position in the next round are cloned into vector type VM; C, F, I at 3′ end position into vector type VR. Cloned fragments could be sequenced at this stage to check for errors in gene synthesis or PCR. These fragments could then be used for a new round of assembly, and again the type of assembly vector used depends on the position of the assembled fragment in the next round DNA assembly (FIG. 5E). Fragments A, B, C were assembled into vector VL, because the assembled fragment ABC will be used as the 5′ fragment in the next round assembly; fragments D, E, F into vector VM, and fragments G, H, I into vector VR. The final step is similar so that the three assembled fragments from step 2 is further assembled into vector VM, which generates the fully assembled fragment that carries adhesive ends x and y defined by the ends of the initial sequence (FIG. 5F).

[0192] A set of at least 6 universal cloning vectors representing 3 types (VL, VM, VR) and 2 antibiotic selection markers are required for hierarchical assembly. Ideally 12 vectors representing 2 different copy numbers are optimal in order to cope with different sizes of DNA fragments at different stages of assembly. Similar system could be developed for LguI based Metclo, but not BpiI, because the scarless system requires universal adaptor u and v to be different. For BsaI and SapI, the bases between the enzyme recognition sequence and adhesive end generated by the enzyme is flexible, therefore it is possible to design different adaptors u and v. For BpiI however, these bases are fixed because the two bases are both required to specify the methylase recognition sequence in BpiI based Metclo. In addition, the methylated base of BpiI based Metclo is located on the top strand of the restriction site. Head-to-head arrangement of BpiI sites for adhesive end switching inevitably results in the methylated base being carried by the LacZ selection marker, not the assembly vector backbone following BpiI digestion, which makes one pot Golden Gate assembly impossible.

### The Relationships Between Scarless Metclo and Metclo

[0193] Metclo was invented to solve the problem of using a single restriction enzyme for type IIS restriction enzyme-based hierarchical assembly of large DNA construct. Scarless Metclo is a further development of Metclo that utilizes key components of the Metclo system (methylase-expressing strains, overlapping methylation/restriction site) to achieve scarless hierarchical assembly of large DNA constructs using a set of universal assembly vectors.

[0194] Scarless Metclo is based on a combination of several different concepts of type IIS-based assembly system:
[0195] 1. A special design of head-to-head type IIS restriction site for adhesive end switching, which has been used in the Moclo system for “level-1” universal cloning vector design. The Moclo “level-1” vector design uses a BpiI-BsaI head-to-head restriction site, which is different from the BsaI-only head-to-head design in the Metclo, but the concept of adhesive end switching is based on the Moclo “level-1” vector design.
[0196] 2. The removal of the assembly scar by designing the scar sequence around the assembled DNA sequence. This hasn't been demonstrated in type IIS-based hierarchical assembly before.
[0197] 3. The use of Metclo system to maintain the same adhesive end sequences for the outer blocks of DNA fragments for each stage of assembly.

[0198] The use of Metclo system is key to achieve multi-stage hierarchical assembly using the same universal adhesive end sequence. The first two concepts alone are sufficient for scarless single stage assembly of DNA using a universal assembly vector. The single stage scarless assembly system however could not be adapted easily for multi-stage hierarchical assembly using the traditional Moclo system, because the universal adaptor sequence of the adhesive end switching vector design for different enzymes are different (BsaI would be CTCN and NGAG, and BpiI ACNN and NNGT). This means that in order to achieve hierarchical scarless assembly using the two enzyme-based Moclo, very long repetitive adaptor sequences need to be added to the ends of the outer blocks depending on the number of stages of assembly, which will be “chewed back” following each stage of assembly (FIG. 6). Because Metclo system uses a single enzyme for different stages of assembly, the same universal adaptor sequence could be used for the outer blocks during different stages of assembly, which greatly simplifies the design of the assembly process.

### EXAMPLE 3—IDENTIFIED METHYLASE AND TYPE IIS RESTRICTION ENZYME COMBINATIONS

[0199] Table 3 contains a list of methylase/restriction enzyme combinations that may result in blocking of overlapping methylation/restriction site for all known type IIS restriction enzymes (78 enzymes representing 19 different specificity).

[0200] The list was generated using a custom Perl script based on a list of known type IIS restriction enzymes and a list of known type II DNA methylases, both from Rebase (PMID 25378308. (Nucleic Acids Res. 2015 43: D298-9).

[0201] The listed methylases are limited to methylases from type II restriction/modification systems with recognition sequences of at least 4 bp and for which the position of the methylated base is known. Methylases from the type IIG restriction/modification system that contain both methylase and restriction enzyme activity in the same protein are excluded. In addition to the restriction enzyme recognition sequence, further bases must be required to specify the methylase se activity towards the overlapping methylation/restriction site. Any methylase whose recognition sequence is identical to or enclosed by the restriction site are removed. In addition, the methylation sequence must not intrude into the adhesive end sequence generated by the type IIS restriction enzyme.

[0202] The DNA sequences are listed using the IUPAC Ambiguity Codes. M represents A or C; R represents A or G; W represents A or T; S represents C or G; Y represents C or T; K represents G or T; V represents A or C or G; H represents A or C or T; D represents A or G or T; B represents C or G or T; N represents A or T or C or G.

[0203] ‘Restriction enzyme’ lists the name of type IIS restriction enzyme. Restriction enzymes that recognize the same sequence are grouped together.

[0204] ‘Restriction site’ lists the recognition sequence of the restriction enzyme.

[0205] ‘Methylase’ listed the name of the methylase that could block the overlapping methylation/restriction site. Methylases that recognize the same sequence and generate the same pattern of methylation are grouped together.

[0206] ‘Methylation sequence’ lists the recognition sequence of the methylase.

[0207] ‘Position of methylated base’ listed the position of the methylated base or opposite base in the methylase recognition sequence.

[0208] ‘Type of methylation’ lists the types of methylation for the methylated bases in the order of the positions of methylated bases listed in the previous column. m6A represents N6-methyladenine; m5C represents C5-methylcytosine; m4C represents N4-methylcytosine; ‘Unknown’ represents unknown type of methylation.

[0209] ‘Overlapping methylation/restriction site’ lists the sequence of the overlapping methylation/restriction site that may result in blocking of the action of listed restriction enzyme through methylation by the listed methylase. For some pairs of restriction enzyme/methylase combination, there are several different overlapping methylation/restriction sites to choose from. The bases bracketed in ‘[ ]’ represent the adhesive ends generated by the restriction enzyme.

TABLE 3

| | | | | Posi- | | |
|---|---|---|---|---|---|---|
| | | | | tion | | |
| | Re- | | | of | | |
| | stric- | | Methyla- | methyl- | Type of | |
| Restriction | tion | | tion | ated | methyl- | Overlapping methylation/ |
| enzyme | site | Methylase | sequence | base | ation | restriction site |
| Sth132I | CCCG | M.AciI | CCGC | 1, 3 | m5C | CCCGCNNN[NNNN] |
| Sth132I | CCCG | M.Ama55I, M.CnaPQ2III, M.Rmo1926II, | CGGCCG | 1, 6 | m5C | CCCGGCCG[NNNN] |
| | | M.SenC1765IV, M.SspG1I, M.XorPXII | | | | |
| Sth132I | CCCG | M.ApaI | GGGCCC | 3, 4 | m5C | GGGCCCGNNNN[NNNN] |
| Sth132I | CCCG | M.AquI | CYCGRG | 1, 6 | m5C | CCCGRGNN[NNNN] |
| Sth132I | CCCG | M.AspDUT2 II, M.BstYI, M.CagIII, | RGATCY | 2, 5 | m4C | RGATCCCGNNNN[NNNN] |
| | | M.Mpa1757V, M.Mru1279V, M.RsaIII, | | | | |
| | | M.XhoII | | | | |
| Sth132I | CCCG | M.AspWA102I, M.AvaVII, M.BceJII, M.CbeI, | GGCC | 2, 3 | m4C | GGCCCGNNNN[NNNN] |
| | | M.Ckr177II, M.CmaLM2IV, M.CpeAVII, | | | | |
| | | M.Csp323II, M.PhoI, M.Ssp6714III, M.SuaI | | | | |
| Sth132I | CCCG | M.AvaV, M.SliSI | GATC | 1, 4 | m4C | GATCCCGNNNN[NNNN], |
| | | | | | | CCCGATCN[NNNN] |
| Sth1321 | CCCG | M.BamHI | GGATCC | 2, 5 | m4C | GGATCCCGNNNN[NNNN] |
| Sth132I | CCCG | M.BanII, M.EcoT38I | GRGCYC | 3, 4 | m5C | GRGCCCGNNNN[NNNN] |
| Sth132I | CCCG | M.BanLII, M.CpeAII, M.SinI | GGWCC | 2, 4 | m5C | GGWCCCGNNNN[NNNN] |
| Sth132I | CCCG | M.BceSII | GGWCC | 1, 5 | m5C | GGWCCCCGNNNN[NNNN], |
| | | | | | | GGWCCCGNNNN[NNNN], |
| | | | | | | CCCGGWCC[NNNN] |
| Sth132I | CCCG | M.BepI, M.FpsJV, M.Gel16401III, M.Pdi8503I | CGCG | 1, 4 | m5C | CCCGCGNN[NNNN] |
| Sth132I | CCCG | M.Bgl2196III | CGTACG | 2, 5 | m4C | CCCGTACG[NNNN] |
| Sth132I | CCCG | M.BhaII, M.BspRI, M.BsuRI, M.CthVI, | GGCC | 2, 3 | m5C | GGCCCGNNNN[NNNN] |
| | | M.DthLII, M.HaeIII, M.MthTI, M.NgoAII, | | | | |
| | | M.NgoPII, M.Pod15391I | | | | |
| Sth132I | CCCG | M.BsoBI | CYCGRG | 1, 6 | m4C | CCCGRGNN[NNNN] |
| Sth132I | CCCG | M.Bsp14III, M.Bsp3003I, M.Bsp3004I, | GATC | 1, 4 | m5C | GATCCCGNNNN[NNNN], |
| | | M.CalB3III, M.CpeAIII, M.Esu35585I, | | | | CCCGATCN[NNNN] |
| | | M.FpsJIV, M.Lba2031I, M.Lbo2004I, | | | | |
| | | M.LlaKR2I, M.Lmo1042I, M.Lmo7956II, | | | | |
| | | M.Lsp10393II, M.MspI7I, M.Sau3AI, M.Sba3I, | | | | |
| | | M.Sin395I, M.Spn23FI, M.Sth368I | | | | |
| Sth132I | CCCG | M.BsuFI, M.CpeAIV, M.MspI | CCGG | 1, 4 | m5C | CCCGGNNN[NNNN] |
| Sth132I | CCCG | M.Cac8I | GCNNGC | 2, 5 | m5C | GCCCGCNNN[NNNN] |
| Sth132I | CCCG | M.Cdi630III | CCSSGG | 2, 5 | m4C | CCCCGGNNN[NNNN], CCCGGGNN[NNNN], |
| | | | | | | CCCGSGGN[NNNN] |
| Sth132I | CCCG | M.Cfr9I, M.SmaI, M.Sma36365II, M.Xca85III, | CCCGGG | 2, 5 | m4C | CCCGGGNN[NNNN] |
| | | M.XcyI, M.XmaI, M.XveII | | | | |
| Sth132I | CCCG | M.CocIII, M.Fsi4947II, M.TdeIII, | GGNCC | 1, 5 | m4C | GGNCCCCGNNNN[NNNN], |
| | | M.Tph12270I | | | | GGNCCCGNNNN[NNNN], |
| | | | | | | GGCCCGNNNN[NNNN], CCCGGNCC[NNNN] |
| Sth132I | CCCG | M.CviJI | RGCB | 2, 3 | m5C | CCCGCYNN[NNNN], VGCCCGNNNN[NNNN] |
| Sth132I | CCCG | M.Dac11109II, M.Hfo6591I, M.MhuII, | GTAC | 1, 4 | m4C | GTACCCGNNNN[NNNN], |
| | | M.MjaV, M.MlaZII, M.MspLW5I, M.RsaI | | | | CCCGTACN[NNNN] |
| Sth132I | CCCG | M.Djo10085II, M.Ssp6803II | GGCC | 2, 3 | Unknown | GGCCCGNNNN[NNNN] |
| Sth132I | CCCG | M.DsaV, M.Ecl18kI, M.FpsJVI, M.NlaX, | CCNGG | 2, 4 | m5C | CCCGGNNN[NNNN] |
| | | M.SenPI, M.SsoII | | | | |
| Sth132I | CCCG | M.Eco29kI, M.NgoAIII, M.SacII | CCGCGG | 2, 5 | m5C | CCCGCGGN[NNNN] |
| Sth132I | CCCG | M.EcoO109I | RGGNCCY | 3, 5 | m5C | RGGNCCCGNNNN[NNNN] |
| Sth132I | CCCG | M.EfaRFII, M.Mae7806II | CCGG | 2, 3 | m4C | CCCGGNNN[NNNN] |
| Sth132I | CCCG | M.FisAW1I, M.ThaI, M.Tph12270II | CGCG | 1, 4 | m4C | CCCGCGNN[NNNN] |
| Sth132I | CCCG | M.FnoB1II, M.Hal24586I, M.Hpy298V, | CCGG | 1, 4 | m4C | CCCGGNNN[NNNN] |
| | | M.Hpy299IX, M.Hpy30V, M.Hpy32XI, | | | | |
| | | M.Hpy57V, M.Hpy66IX, M.Hpy99VIII, | | | | |
| | | M.HpyFV, M.HpyUM032IX, M.HpyUM037IX, | | | | |
| | | M.MjaVI, M.PspJDRI, M.TmeBII | | | | |
| Sth132I | CCCG | M.FpsJI, M.HpaII, M.Nme18II, M.NmeAI | CCGG | 2, 3 | m5C | CCCGGNNN[NNNN] |
| Sth1321 | CCCG | M.HgiCI | GGYRCC | 2, 5 | m5C | GGYRCCCGNNNN[NNNN] |
| Sth132I | CCCG | M.Hpy66I, M.Hpy991 | CGWCG | 2, 4 | m4C | CCCGWCGN[NNNN] |
| Sth132I | CCCG | M.Hpy99IV, M.HpyFORFX | CCNNGG | 1, 6 | m4C | CCCGGGNN[NNNN], CCCGNGGN[NNNN] |
| Sth132I | CCCG | M.Mae7806III, M.PspPI, M.Sau96I | GGNCC | 2, 4 | m5C | GGNCCCGNNNN[NNNN], |
| | | | | | | GGCCCGNNNN[NNNN] |
| Sth132I | CCCG | M.MjaII | GGNCC | 1, 5 | m5C | GGNCCCCGNNNN[NNNN], |
| | | | | | | GGNCCCGNNNN[NNNN], |
| | | | | | | GGCCCGNNNN[NNNN], CCCGGNCC[NNNN] |
| Sth132I | CCCG | M.MpeII | RGCY | 2, 3 | m5C | RGCCCGNNNN[NNNN] |
| Sth132I | CCCG | M.NgoAXV, M.NgoMV | GGNNCC | 2, 5 | m5C | GGNNCCCGNNNN[NNNN], |
| | | | | | | GGNCCCGNNNN[NNNN] |
| Sth132I | CCCG | M.NheI | GCTAGC | 1, 6 | m4C | GCTAGCCCGNNNN[NNNN] |
| Sth132I | CCCG | M.NmeDI | VCCGGY | 2, 5 | m5C | CCCGGYNN[NNNN] |
| Sth132I | CCCG | M.Pfa23572II | CGATCG | 1, 6 | m5C | CCCGATCG[NNNN] |
| Sth132I | CCCG | M.Psp737I | CCCCCD | 4 | m4C | CCCCCGNNNN[NNNN] |
| Sth132I | CCCG | M.RpaV | GCCCGCC | 4 | m4C | GCCCGCCNN[NNNN] |
| Sth132I | CCCG | M.SuaII | RGATCY | 2, 5 | m5C | RGATCCCGNNNN[NNNN] |
| Sth132I | CCCG | M1.Bag18758II, M2.Bag18758II | CCCGTG | 2, 4 | Unknown | CCCGTGNN[NNNN] |
| Sth132I | CCCG | M1.BcnI, M2.BcnI, M.NciI | CCSGG | 2, 4 | m4C | CCCGGNNN[NNNN] |
| Sth1321 | CCCG | M1.BspACI | CCGC | 1 | m5C | CCCGCNNN[NNNN] |
| Sth132I | CCCG | M1.CspNS6II | TCCGCC | 5 | m5C | TCCGCCCGNNNN[NNNN] |
| Alw26I, BcoDI, | GTCTC | M.AatII, M.Lsp6406III | GACGTC | 2, 5 | m6A | GACGTCTCN[NNNN] |
| BsmAI, BsoMAI, | | | | | | |
| BstMAI | | | | | | |
| Alw26I, BcoDI, | GTCTC | M.AbaBs12I, M.Awo1030I, M.Cdu23823I, | CCWGG | 1, 5 | m5C | CCWGGTCTCN[NNNN] |
| BsmAI, BsoMAI, | | M.Csa8155II, M.Cun9529I, M.EasL1Dcm, | | | | |
| BstMAI | | M.Eba57Dcm, M.Ecl34399Dcm, | | | | |
| | | M.Eco12761Dcm, M.Eco3609Dcm, | | | | |
| | | M.Eco4255Dcm, M.EcoVR50Dcm, | | | | |
| | | M.EsaSP1II, M.Kpn34618Dcm, | | | | |
| | | M.Kpn38547Dcm, M.Kpn39I, M.Kpn43816I, | | | | |
| | | M.Kpn677ORFDcm, M.Kpn928Dcm, | | | | |
| | | M.KpnNIH1Dcm, M.KpnNIH10Dcm, | | | | |
| | | M.KpnNIH30Dcm, M.Kva120Dcm, M.Lsp48I, | | | | |
| | | M.Pmi1I, M.SpaD2III, M.SplRp8II, | | | | |
| | | M.SptADcm, M.Tsu2489III | | | | |
| Alw26I, BcoDI, | GTCTC | M.AbrSp7I, M.Apa101655II, M.Ath21654I, | GANTC | 2, 4 | m6A | GAGTCTCN[NNNN] |
| BsmAI, BsoMAI, | | M.BdiNK6I, M.Bel76I, M.Bsp460I, | | | | |
| BstMAI | | M.BspJKG1II, M.BspLA1II, M.BspRAC04II, | | | | |
| | | M.CagII, M.CcrMI, M.CcrNAI, M.CnaPQ2I, | | | | |
| | | M.Csp16704III, M.CspNS6I, M.CviBI, | | | | |
| | | M.CviQVI, M.Eli8509I, M.Fnu419I, M.Fsp71I, | | | | |
| | | M.HbaI, M.HhaII, M.HinfI, M.HinHia1I, | | | | |
| | | M.Hpy298IV, M.Hpy299IV, M.Hpy32IV, | | | | |
| | | M.Hpy57IV, M.Hpy66IV, M.Hpy99IX, | | | | |
| | | M.HpyAIV, M.HpyFIV, M.HpyUM032IV, | | | | |
| | | M.HpyUM037IV, M.Mbo45III, M.Msp10I, | | | | |
| | | M.Msp73BI, M.MspAL11I, M.MspLW5II, | | | | |
| | | M.NhaXII, M.NpeUS61I, M.OspHL35I, | | | | |
| | | M.Pin17395II, M.Pla5III, M.PspLM6I, | | | | |
| | | M.RbaNRL2I, M.Rgi145II, M.Rmo1926I, | | | | |
| | | M.RpaIII, M.RsaII, M.RshIII, M.Rsp8I, | | | | |
| | | M.SmeC3I, M.SmoLV, M.Sna24252I, | | | | |
| | | M.SscL1I, M.SspM41II, M.SstE37II, M.ThaIII, | | | | |
| | | M.Xsp91I, M.ZmoCP4I | | | | |
| Alw26I, BcoDI, | GTCTC | M.AciI | GCGG | 2, 4 | m5C | GCGGTCTCN[NNNN] |
| BsmAI, BsoMAI, | | | | | | |
| BstMAI | | | | | | |
| Alw26I, BcoDI, | GTCTC | M.AflIII | ACRYGT | 2, 5 | m4C | ACRYGTCTCN[NNNN] |
| BsmAI, BsoMAI, | | | | | | |
| BstMAI | | | | | | |
| Alw26I, BcoDI, | GTCTC | M.AhdI | GACNNNN | 2, 10 | m6A | GACNNNNNGTCTCN[NNNN] |
| BsmAI, BsoMAI, | | | NGTC | | | |
| BstMAI | | | | | | |
| Alw26I, BcoDI, | GTCTC | M.Ama55I, M.CnaPQ2III, M.Rmo1926II, | CGGCCG | 1, 6 | m5C | CGGCCGTCTCN[NNNN] |
| BsmAI, BsoMAI, | | M.SenC1765IV, M.SspG1I, M.XorPXII | | | | |
| BstMAI | | | | | | |
| Alw26I, BcoDI, | GTCTC | M.AquI | CYCGRG | 1, 6 | m5C | CYCGRGTCTCN[NNNN] |
| BsmAI, BsoMAI, | | | | | | |
| BstMAI | | | | | | |
| Alw26I, BcoDI, | GTCTC | M.AvaIX, M.Cfr10I, M.Nme18VI, M.VchAI, | RCCGGY | 2, 5 | m5C | RCCGGTCTCN[NNNN] |
| BsmAI, BsoMAI, | | M.Vch0395I | | | | |
| BstMAI | | | | | | |
| Alw26I, BcoDI, | GTCTC | M.BcoSlacII, M.MspLW5III, M.Nbr128I, | CTCGAG | 1, 6 | m4C | CTCGAGTCTCN[NNNN] |
| BsmAI, BsoMAI, | | M.Psy18884II, M.Tam77409II, M.TbrGE1II, | | | | |
| BstMAI | | M.TpaRLII | | | | |
| Alw26I, BcoDI, | GTCTC | M.BepI, M.FpsJV, M.Gel16401III, M.Pdi8503I | CGCG | 1, 4 | m5C | CGCGTCTCN[NNNN] |
| BsmAI, BsoMAI, | | | | | | |
| BstMAI | | | | | | |
| Alw26I, BcoDI, | GTCTC | M.BsoBI | CYCGRG | 1, 6 | m4C | CYCGRGTCTCN[NNNN] |
| BsmAI, BsoMAI, | | | | | | |
| BstMAI | | | | | | |
| Alw26I, BcoDI, | GTCTC | M.BsuFI, M.CpeAIV, M.MspI | CCGG | 1, 4 | m5C | CCGGTCTCN[NNNN] |
| BsmAI, BsoMAI, | | | | | | |
| BstMAI | | | | | | |
| Alw26I, BcoDI, | GTCTC | M.Cab13497I, M.Dac11109III, M.Dco13527I, | CTAG | 1, 4 | m4C | CTAGTCTCN[NNNN] |
| BsmAI, BsoMAI, | | M.Djo10085I, M.Hbo11551I, M.Hka19301III, | | | | |
| BstMAI | | M.Hme33500I, M.HsaR1I, M.Hsi33800I, | | | | |
| | | M.HspKM1WII, M.HspNII, M.HtuI, M.HvoDSI, | | | | |
| | | M.Lba2029II, M.Mbo45II, M.MjaI, M.MthZI, | | | | |
| | | M.Nas12278I, M.Rfl3010I, M.SsmMI | | | | |
| Alw26I, BcoDI, | GTCTC | M.CagVIII | ACGCGT | 2, 5 | m4C | ACGCGTCTCN[NNNN] |
| BsmAI, BsoMAI, | | | | | | |
| BstMAI | | | | | | |
| Alw26I, BcoDI, | GTCTC | M.CfrBI, M.Sen1735IV, M.SenAnaIV | CCWWGG | 1, 6 | m4C | CCWWGGTCTCN[NNNN] |
| BsmAI, BsoMAI, | | | | | | |
| BstMAI | | | | | | |
| Alw26I, BcoDI, | GTCTC | M.Cmu51329I, M.EcoJA03PDcm, | CCWGG | 1, 5 | Unknown | CCWGGTCTCN[NNNN] |
| BsmAI, BsoMAI, | | M.RorR1Dcm, M.Sen8391 Dcm, M.ZalSM2II | | | | |
| BstMAI | | | | | | |
| Alw26I, BcoDI, | GTCTC | M.DdeI | CTNAG | 1, 5 | m5C | CTNAGTCTCN[NNNN] |
| BsmAI, BsoMAI, | | | | | | |
| BstMAI | | | | | | |
| Alw26I, BcoDI, | GTCTC | M.Esp3I | CGTCTC | 4, 3 | m5C, | |
| BsmAI, BsoMAI, | | | | | m6A | |
| BstMAI | | | | | | |
| Alw26I, BcoDI, | GTCTC | M.FatI | CATG | 1, 4 | m5C | CATGTCTCN[NNNN] |
| BsmAI, BsoMAI, | | | | | | |
| BstMAI | | | | | | |
| Alw26I, BcoDI, | GTCTC | M.FisAW1I, M.ThaI, M.Tph12270II | CGCG | 1, 4 | m4C | CGCGTCTCN[NNNN] |
| BsmAI, BsoMAI, | | | | | | |
| BstMAI | | | | | | |
| Alw26I, BcoDI, | GTCTC | M.FnoB1II, M.Hal24586I, M.Hpy298V, | CCGG | 1, 4 | m4C | CCGGTCTCN[NNNN] |
| BsmAI, BsoMAI, | | M.Hpy299IX, M.Hpy30V, M.Hpy32XI, | | | | |
| BstMAI | | M.Hpy57V, M.Hpy66IX, M.Hpy99VIII, | | | | |
| | | M.HpyFV, M.HpyUM032IX, M.HpyUM037IX, | | | | |
| | | M.MjaVI, M.PspJDRI, M.TmeBII | | | | |
| Alw26I, BcoDI, | GTCTC | M.GsuRed1IV, M.Osp807II, M.Tth111I | GACNNNG | 2, 8 | m6A | GACNNNGTCTCN[NNNN] |
| BsmAI, BsoMAI, | | | TC | | | |
| BstMAI | | | | | | |
| Alw26I, BcoDI, | GTCTC | M.Hpy298II, M.Hpy299II, M.Hpy66II, | ACNGT | 2, 4 | m4C | ACNGTCTCN[NNNN] |
| BsmAI, BsoMAI, | | M.HpyUM032II, M.HpyUM037II | | | | |
| BstMAI | | | | | | |
| Alw26I, BcoDI, | GTCTC | M.Hpy30X, M.Hpy57VIII, M.HpyFXI, M.MhuI | CTNAG | 1, 5 | m4C | CTNAGTCTCN[NNNN] |
| BsmAI, BsoMAI, | | | | | | |
| BstMAI | | | | | | |
| Alw26I, BcoDI, | GTCTC | M.Hpy99IV, M.HpyFORFX | CCNNGG | 1, 6 | m4C | CCNNGGTCTCN[NNNN] |
| BsmAI, BsoMAI, | | | | | | |
| BstMAI | | | | | | |
| Alw26I, BcoDI, | GTCTC | M.Hpy99XI | ACGT | 2, 3 | m5C | ACGTCTCN[NNNN] |
| BsmAI, BsoMAI, | | | | | | |
| BstMAI | | | | | | |
| Alw26I, BcoDI, | GTCTC | M.HpyD27I | GAGG | 2, 4 | m6A, | GAGGTCTCN[NNNN] |
| BsmAI, BsoMAI, | | | | | m5C | |
| BstMAI | | | | | | |
| Alw26I, BcoDI, | GTCTC | M.Lph145I, M.Lph93I | TCWCC | 1 | m6A | GTCTCC[NNNN] |
| BsmAI, BsoMAI, | | | | | | |
| BstMAI | | | | | | |
| Alw26I, BcoDI, | GTCTC | M.MlyI, M.Pen113I | GASTC | 2, 4 | m6A | GAGTCTCN[NNNN] |
| BsmAI, BsoMAI, | | | | | | |
| BstMAI | | | | | | |
| Alw26I, BcoDI, | GTCTC | M.Msp1II | CCAGG | 5 | m4C | CCAGGTCTCN[NNNN] |
| BsmAI, BsoMAI, | | | | | | |
| BstMAI | | | | | | |
| Alw26I, BcoDI, | GTCTC | M.Msp42II | CCWGG | 1, 5 | m4C | CCWGGTCTCN[NNNN] |
| BsmAI, BsoMAI, | | | | | | |
| BstMAI | | | | | | |
| Alw26I, BcoDI, | GTCTC | M.NmeDI | VCCGGY | 2, 5 | m5C | VCCGGTCTCN[NNNN] |
| BsmAI, BsoMAI, | | | | | | |
| BstMAI | | | | | | |
| Alw26I, BcoDI, | GTCTC | M.NmeMC58III | TCTGG | 5 | m5C | TCTGGTCTCN[NNNN] |
| BsmAI, BsoMAI, | | | | | | |
| BstMAI | | | | | | |
| Alw26I, BcoDI, | GTCTC | M.Nsp209III, M.Nsp51109II | CTCGAG | 1, 6 | m5C | CTCGAGTCTCN[NNNN] |
| BsmAI, BsoMAI, | | | | | | |
| BstMAI | | | | | | |
| Alw26I, BcoDI, | GTCTC | M.NspI, M.NspHI | RCATGY | 2, 5 | m5C | RCATGTCTCN[NNNN] |
| BsmAI, BsoMAI, | | | | | | |
| BstMAI | | | | | | |
| Alw26I, BcoDI, | GTCTC | M.Pam7686I | CCATGG | 1, 6 | m5C | CCATGGTCTCN[NNNN] |
| BsmAI, BsoMAI, | | | | | | |
| BstMAI | | | | | | |
| Alw26I, BcoDI, | GTCTC | M.Pfa23572II | CGATCG | 1, 6 | m5C | CGATCGTCTCN[NNNN] |
| BsmAI, BsoMAI, | | | | | | |
| BstMAI | | | | | | |
| Alw26I, BcoDI, | GTCTC | M.Pla5I | CTAG | 1, 4 | Unknown | CTAGTCTCN[NNNN] |
| BsmAI, BsoMAI, | | | | | | |
| BstMAI | | | | | | |
| Alw26I, BcoDI, | GTCTC | M.Sam53668II | CCATGG | 1, 6 | Unknown | CCATGGTCTCN[NNNN] |
| BsmAI, BsoMAI, | | | | | | |
| BstMAI | | | | | | |
| Alw26I, BcoDI, | GTCTC | M.Sen1781III | CCWWGG | 1, 6 | Unknown | CCWWGGTCTCN[NNNN] |
| BsmAI, BsoMAI, | | | | | | |
| BstMAI | | | | | | |
| Alw26I, BcoDI, | GTCTC | M.SonIII | GCANNNN | 3, 9 | m6A | |
| BsmAI, BsoMAI, | | | GTC | | | |
| BstMAI | | | | | | |
| Alw26I, BcoDI, | GTCTC | M.TdeII | GAAGAG | 5, 6 | m6A, | GAAGAGTCTCN[NNNN] |
| BsmAI, BsoMAI, | | | | | m4C | |
| BstMAI | | | | | | |
| Alw26I, BcoDI, | GTCTC | M.TspRI | CASTG | 1, 5 | m5C | CASTGTCTCN[NNNN] |
| BsmAI, BsoMAI, | | | | | | |
| BstMAI | | | | | | |
| Alw26I, BcoDI, | GTCTC | M1.AgoG2I, M2.AgoG2I | CCAGT | 1, 4 | m4C | ACTGGTCTCN[NNNN], |
| BsmAI, BsoMAI, | | | | | | CCAGTCTCN[NNNN] |
| BstMAI | | | | | | |
| Alw26I, BcoDI, | GTCTC | M1.BceSIII | GCCGT | 4 | m4C | GCCGTCTCN[NNNN] |
| BsmAI, BsoMAI, | | | | | | |
| BstMAI | | | | | | |
| Alw26I, BcoDI, | GTCTC | M1.BspACI | GCGG | 4 | m5C | GCGGTCTCN[NNNN] |
| BsmAI, BsoMAI, | | | | | | |
| BstMAI | | | | | | |
| Alw26I, BcoDI, | GTCTC | M1.Dsh12II, M2.Dsh12II | GCCGTC | 3, 4 | m4C | GCCGTCTCN[NNNN] |
| BsmAI, BsoMAI, | | | | | | |
| BstMAI | | | | | | |
| Alw26I, BcoDI, | GTCTC | M1.Eco31I, M1.EcoMI | GGTCTC | 3 | m6A | GGTCTCN[NNNN] |
| BsmAI, BsoMAI, | | | | | | |
| BstMAI | | | | | | |
| Alw26I, BcoDI, | GTCTC | M1.Hpy32II | TCYYC | 1 | m6A | GTCTCC[NNNN] |
| BsmAI, BsoMAI, | | | | | | |
| BstMAI | | | | | | |
| Alw26I, BcoDI, | GTCTC | M1.LplAG30I | GAAGG | 5 | m5C | GAAGGTCTCN[NNNN] |
| BsmAI, BsoMAI, | | | | | | |
| BstMAI | | | | | | |
| Alw26I, BcoDI, | GTCTC | M2.BceSIII, M1.Pru9I, M2.Pru9I | GCCGT | 2, 4 | m4C | GCCGTCTCN[NNNN] |
| BsmAI, BsoMAI, | | | | | | |
| BstMAI | | | | | | |
| Alw26I, BcoDI, | GTCTC | M2.BfiI | CCCAGT | 5 | m4C | CCCAGTCTCN[NNNN] |
| BsmAI, BsoMAI, | | | | | | |
| BstMAI | | | | | | |
| Alw26I, BcoDI, | GTCTC | M2.BfuAI | GCAGGT | 5 | m5C | GCAGGTCTCN[NNNN] |
| BsmAI, BsoMAI, | | | | | | |
| BstMAI | | | | | | |
| Alw26I, BcoDI, | GTCTC | M2.Eco31I | GGTCTC | 4 | m5C | GGTCTCN[NNNN] |
| BsmAI, BsoMAI, | | | | | | |
| BstMAI | | | | | | |
| Alw26I, BcoDI, | GTCTC | M2.HgaI, M1.LlaJI | GCGTC | 3 | m5C | GCGTCTCN[NNNN] |
| BsmAI, BsoMAI, | | | | | | |
| BstMAI | | | | | | |
| Alw26I, BcoDI, | GTCTC | M2.HpyAVI, M1.MnlI | GAGG | 4 | m5C | GAGGTCTCN[NNNN] |
| BsmAI, BsoMAI, | | | | | | |
| BstMAI | | | | | | |
| Alw26I, BcoDI, | GTCTC | M2.Nme579IV, M2.NmeMC58II | GCGTC | 4 | m6A | GCGTCTCN[NNNN] |
| BsmAI, BsoMAI, | | | | | | |
| BstMAI | | | | | | |
| AlwXI, BbvI, | GCAG | M.AbaBs12I, M.Awo1030I, M.Cdu23823I, | CCWGG | 1, 5 | m5C | CCWGGCAGCNNNNNNNN[NNNN], |
| BseKI, BseXI, | C | M.Csa8155II, M.Cun9529I, M.EasL1Dcm, | | | | GCAGCCWGGNNNN[NNNN] |
| Bsp423I, Bst12I, | | M.Eba57Dcm, M.Ecl34399Dcm, | | | | |
| Bst71I, BstV1I, | | M.Eco12761Dcm, M.Eco3609Dcm, | | | | |
| GeoICI, Lsp1109I | | M.Eco4255Dcm, M.EcoVR50Dcm, | | | | |
| | | M.EsaSP1II, M.Kpn34618Dcm, | | | | |
| | | M.Kpn38547Dcm, M.Kpn39I, M.Kpn43816I, | | | | |
| | | M.Kpn677ORFDcm, M.Kpn928Dcm, | | | | |
| | | M.KpnNIH1Dcm, M.KpnNIH10Dcm, | | | | |
| | | M.KpnNIH30Dcm, M.Kva120Dcm, M.Lsp48I, | | | | |
| | | M.Pmi1I, M.SpaD2III, M.SplRp8II, | | | | |
| | | M.SptADcm, M.Tsu2489III | | | | |
| AlwXI, BbvI, | GCAG | M.Acc65VI, M.SenAZIII | CTKMAG | 2, 5 | m6A | CTGCAGCNNNNNNNN[NNNN] |
| BseKI, BseXI, | C | | | | | |
| Bsp423I, Bst12I, | | | | | | |
| Bst71I, BstV1I, | | | | | | |
| GeoICI, Lsp1109I | | | | | | |
| AlwXI, BbvI, | GCAG | M.AciI | CCGC | 1, 3 | m5C | GCGGCAGCNNNNNNNN[NNNN], |
| BseKI, BseXI, | C | | | | | GCAGCGGNNNNNN[NNNN], |
| Bsp423I, Bst12I, | | | | | | CCGCAGCNNNNNNNN[NNNN], |
| Bst71I, BstV1I, | | | | | | GCAGCCGCNNNNN[NNNN] |
| GeoICI, Lsp1109I | | | | | | |
| AlwXI, BbvI, | GCAG | M.Ade56712I, M.Asp588III, M.AveCB51II, | CTGCAG | 2, 5 | m6A | CTGCAGCNNNNNNNN[NNNN] |
| BseKI, BseXI, | C | M.BbrUIII, M.Blo30698I, M.BsuBI, | | | | |
| Bsp423I, Bst12I, | | M.CpaYL7III, M.Dba7044I, M.Dfa45958II, | | | | |
| Bst71I, BstV1I, | | M.Eco12581I, M.Eco2012I, M.EcoGIII, | | | | |
| GeoICI, Lsp1109I | | M.EcoG089I, M.Eho16691II, M.Hal5920II, | | | | |
| | | M.Lsp6406II, M.MspNR41II, M.Pae490I, | | | | |
| | | M.Pox23570I, M.PstI, M.RpaII, M.Sca3403II, | | | | |
| | | M.Tsp61I, M.XmnII, M.YenWI, M.YinY228I | | | | |
| AlwXI, BbvI, | GCAG | M.AluBI | AGCT | 1, 4 | m6A | GCAGCTNNNNNNN[NNNN] |
| BseKI, BseXI, | C | | | | | |
| Bsp423I, Bst12I, | | | | | | |
| Bst71I, BstV1I, | | | | | | |
| GeoICI, Lsp1109I | | | | | | |
| AlwXI, BbvI, | GCAG | M.AluI, M.CspCY2I | AGCT | 2, 3 | m5C | GCAGCTNNNNNNN[NNNN] |
| BseKI, BseXI, | C | | | | | |
| Bsp423I, Bst12I, | | | | | | |
| Bst71I, BstV1I, | | | | | | |
| GeoICI, Lsp1109I | | | | | | |
| AlwXI, BbvI, | GCAG | M.Ama55I, M.CnaPQ2III, M.Rmo1926II, | CGGCCG | 1, 6 | m5C | CGGCCGCAGCNNNNNNNN[NNNN], |
| BseKI, BseXI, | C | M.SenC1765IV, M.SspG1I, M.XorPXII | | | | GCAGCGGCCGNNN[NNNN] |
| Bsp423I, Bst12I, | | | | | | |
| Bst71I, BstV1I, | | | | | | |
| GeoICI, Lsp1109I | | | | | | |
| AlwXI, BbvI, | GCAG | M.AplI | CTGCAG | 3, 4 | m5C | CTGCAGCNNNNNNNN[NNNN] |
| BseKI, BseXI, | C | | | | | |
| Bsp423I, Bst12I, | | | | | | |
| Bst71I, BstV1I, | | | | | | |
| GeoICI, Lsp1109I | | | | | | |
| AlwXI, BbvI, | GCAG | M.AquI | CYCGRG | 1, 6 | m5C | CYCGRGCAGCNNNNNNNN[NNNN], |
| BseKI, BseXI, | C | | | | | GCAGCYCGRGNNN[NNNN] |
| Bsp423I, Bst12I, | | | | | | |
| Bst71I, BstV1I, | | | | | | |
| GeoICI, Lsp1109I | | | | | | |
| AlwXI, BbvI, | GCAG | M.AsiSI | GCGATCGC | 2, 7 | m5C | GCGATCGCAGCNNNNNNNN[NNNN], |
| BseKI, BseXI, | C | | | | | GCAGCGATCGCNN[NNNN] |
| Bsp423I, Bst12I, | | | | | | |
| Bst71I, BstV1I, | | | | | | |
| GeoICI, Lsp1109I | | | | | | |
| AlwXI, BbvI, | GCAG | M.AvaIX, M.Cfr10I, M.Nme18VI, M.VchAI, | RCCGGY | 2, 5 | m5C | RCCGGCAGCNNNNNNNN[NNNN], |
| BseKI, BseXI, | C | M.Vch0395I | | | | GCAGCCGGYNNNN[NNNN] |
| Bsp423I, Bst12I, | | | | | | |
| Bst71I, BstV1I, | | | | | | |
| GeoICI, Lsp1109I | | | | | | |
| AlwXI, BbvI, | GCAG | M.BcoSlacII, M.MspLW5III, M.Nbr128I, | CTCGAG | 1, 6 | m4C | CTCGAGCAGCNNNNNNNN[NNNN], |
| BseKI, BseXI, | C | M.Psy18884II, M.Tam77409II, M.TbrGE1II, | | | | GCAGCTCGAGNNN[NNNN] |
| Bsp423I, Bst12I, | | M.TpaRLII | | | | |
| Bst71I, BstV1I, | | | | | | |
| GeoICI, Lsp1109I | | | | | | |
| AlwXI, BbvI, | GCAG | M.BepI, M.FpsJV, M.Gel16401III, M.Pdi8503I | CGCG | 1, 4 | m5C | CGCGCAGCNNNNNNNN[NNNN], |
| BseKI, BseXI, | C | | | | | GCAGCGCGNNNNN[NNNN] |
| Bsp423I, Bst12I, | | | | | | |
| Bst71I, BstV1I, | | | | | | |
| GeoICI, Lsp1109I | | | | | | |
| AlwXI, BbvI | GCAG | M.BglI, M.CagI, M.DdeVCDI, M.GsuRed1I | GCCNNNN | 2, 10 | m4C | GCCNNNNNGGCAGCNNNNNNNN[NNNN] |
| BseKI, BseXI, | C | | NGGC | | | |
| Bsp423I, Bst12I, | | | | | | |
| Bst71I BstV1I, | | | | | | |
| GeoICI, Lsp1109I | | | | | | |
| AlwXI, BbvI, | GCAG | M.Ble402III, M.Psp10HI | SAGCTS | 3, 4 | m4C | GCAGCTSNNNNNN[NNNN] |
| BseKI, BseXI, | C | | | | | |
| Bsp423I, Bst12I, | | | | | | |
| Bst71I, BstV1I, | | | | | | |
| GeoICI, Lsp1109I | | | | | | |
| AlwXI, BbvI, | GCAG | M.BsoBI | CYCGRG | 1, 6 | m4C | CYCGRGCAGCNNNNNNNN[NNNN], |
| BseKI, BseXI, | C | | | | | GCAGCYCGRGNNN[NNNN] |
| Bsp423I, Bst12I, | | | | | | |
| Bst71I, BstV1I, | | | | | | |
| GeoICI, Lsp11091 | | | | | | |
| AlwXI, BbvI, | GCAG | M.BsuFI, M.CpeAIV, M.MspI | CCGG | 1, 4 | m5C | CCGGCAGCNNNNNNNN[NNNN], |
| BseKI, BseXI, | C | | | | | GCAGCCGGNNNNN[NNNN] |
| Bsp423I, Bst12I, | | | | | | |
| Bst71I, BstV1I, | | | | | | |
| GeoICI, Lsp1109I | | | | | | |
| AlwXI, BbvI, | GCAG | M.Cab13497I, M.Dac11109III, M.Dco13527I, | CTAG | 1, 4 | m4C | CTAGCAGCNNNNNNNN[NNNN], |
| BseKI, BseXI, | C | M.Djo10085I, M.Hbo11551I, M.Hka19301III, | | | | GCAGCTAGNNNNN[NNNN] |
| Bsp423I, Bst12I, | | M.Hme33500I, M.HsaR1I, M.Hsi33800I, | | | | |
| Bst71I, BstV1I, | | M.HspKM1WII, M.HspNII, M.HtuI, M.HvoDSI, | | | | |
| GeoICI, Lsp1109I | | M.Lba2029II, M.Mbo45II, M.MjaI, M.MthZI, | | | | |
| | | M.Nas12278I, M.Rfl3010I, M.SsmMI | | | | |
| AlwXI, BbvI, | GCAG | M.Cac8I | GCNNGC | 2, 5 | m5C | GCNNGCAGCNNNNNNNN[NNNN], |
| BseKI, BseXI, | C | | | | | GCAGCNNGCNNNN[NNNN] |
| Bsp423I, Bst12I, | | | | | | |
| Bst71I, BstV1I, | | | | | | |
| GeoICI, Lsp1109I | | | | | | |
| AlwXI, BbvI | GCAG | M.CcrNAV | YGCCGGCR | 3, 6 | m5C | YGCCGGCAGCNNNNNNNN[NNNN] |
| BseKI, BseXI, | C | | | | | |
| Bsp423I, Bst12I, | | | | | | |
| Bst71I, BstV1I, | | | | | | |
| GeoICI, Lsp1109I | | | | | | |
| AlwXI, BbvI | GCAG | M.CfrBI, M.Sen1735IV, M.SenAnaIV | CCWWGG | 1, 6 | m4C | CCWWGGCAGCNNNNNNNN[NNNN], |
| BseKI, BseXI, | C | | | | | GCAGCCWWGGNNN[NNNN] |
| Bsp423I, Bst12I, | | | | | | |
| Bst71I, BstV1I, | | | | | | |
| GeoICI, Lsp1109I | | | | | | |
| AlwXI, BbvI, | GCAG | M.Cmu51329I, M.EcoJA03PDcm, | CCWGG | 1, 5 | Unknown | CCWGGCAGCNNNNNNNN[NNNN], |
| BseKI, BseXI, | C | M.RorR1Dcm, M.Sen8391Dcm, M.ZalSM2II | | | | GCAGCCWGGNNNN[NNNN] |
| Bsp423I, Bst12I, | | | | | | |
| Bst71I, BstV1I, | | | | | | |
| GeoICI, Lsp1109I | | | | | | |
| AlwXI, BbvI, | GCAG | M.CsiFSMII, M.MfoCT6IV, M.NgoAIV, | GCCGGC | 2, 5 | m5C | GCCGGCAGCNNNNNNNN[NNNN], |
| BseKI, BseXI, | C | M.NgoMIV, M1.Sgr13350II | | | | GCAGCCGGCNNNN[NNNN] |
| Bsp423I, Bst12I, | | | | | | |
| Bst71I, BstV1I, | | | | | | |
| GeoICI, Lsp1109I | | | | | | |
| AlwXI, BbvI, | GCAG | M.CviJI | RGCB | 2, 3 | m5C | GCAGCBNNNNNNN[NNNN] |
| BseKI, BseXI, | C | | | | | |
| Bsp423I, Bst12I, | | | | | | |
| Bst71I, BstV1I, | | | | | | |
| GeoICI, Lsp1109I | | | | | | |
| AlwXI, BbvI, | GCAG | M.CviRI, M.Hpy298VIII, M.Hpy299VIII, | TGCA | 1, 4 | m6A | TGCAGCNNNNNNNN[NNNN] |
| BseKI, BseXI, | C | M.Hpy30VI, M.Hpy32V, M.Hpy57II, | | | | |
| Bsp423I, Bst12I, | | M.Hpy66VIII, M.HpyFVI, M.HpyUM032VIII, | | | | |
| Bst71I, BstV1I, | | M.HpyUM037VIII | | | | |
| GeoICI, Lsp1109I | | | | | | |
| AlwXI, BbvI, | GCAG | M.Ddel | CTNAG | 1, 5 | m5C | CTNAGCAGCNNNNNNNN[NNNN], |
| BseKI, BseXI, | C | | | | | GCAGCTNAGNNNN[NNNN] |
| Bsp423I, Bst12I, | | | | | | |
| Bst71I, BstV1I, | | | | | | |
| GeoICI, Lsp1109I | | | | | | |
| AlwXI, BbvI, | GCAG | M.DfeI, M.Fnu419II, M.Pen113II | CTNNAG | 2, 5 | m6A | CTGCAGCNNNNNNNN[NNNN] |
| BseKI, BseXI, | C | | | | | |
| Bsp423I, Bst12I, | | | | | | |
| Bst71I, BstV1I, | | | | | | |
| GeoICI, Lsp1109I | | | | | | |
| AlwXI, BbvI, | GCAG | M.FatI | CATG | 1, 4 | m5C | CATGCAGCNNNNNNNN[NNNN], |
| BseKI, BseXI, | C | | | | | GCAGCATGNNNNN[NNNN] |
| Bsp423I, Bst12I, | | | | | | |
| Bst71I, BstV1I, | | | | | | |
| GeoICI, Lsp1109I | | | | | | |
| AlwXI, BbvI, | GCAG | M.FisAW1I, M.ThaI, M.Tph12270II | CGCG | 1, 4 | m4C | CGCGCAGCNNNNNNNN[NNNN], |
| BseKI, BseXI, | C | | | | | GCAGCGCGNNNNN[NNNN] |
| Bsp423I, Bst12I, | | | | | | |
| Bst71I, BstV1I, | | | | | | |
| GeoICI, Lsp1109I | | | | | | |
| AlwXI, BbvI, | GCAG | M.FnoB1II, M.Hal24586I, M.Hpy298V, | CCGG | 1, 4 | m4C | CCGGCAGCNNNNNNNN[NNNN], |
| BseKI, BseXI, | C | M.Hpy299IX, M.Hpy30V, M.Hpy32XI, | | | | GCAGCCGGNNNNN[NNNN] |
| Bsp423I, Bst12I, | | M.Hpy57V, M.Hpy66IX, M.Hpy99VIII, | | | | |
| Bst71I, BstV1I, | | M.HpyFV, M.HpyUM032IX, M.HpyUM037IX, | | | | |
| GeoICI, Lsp1109I | | M.MjaVI, M.PspJDRI, M.TmeBII | | | | |
| AlwXI, BbvI, | GCAG | M.Fsi4947I, M.Mru1279IV, M.NsoJS138I, | CAGCTG | 3, 4 | m4C | GCAGCTGNNNNNN[NNNN] |
| BseKI, BseXI, | C | M1.Psp320WII, M.PvuII, M.SenA46IV, | | | | |
| Bsp423I, Bst12I, | | M.SptAI | | | | |
| Bst71I, BstV1I, | | | | | | |
| GeoICI, Lsp1109I | | | | | | |
| AlwXI, BbvI, | GCAG | M.HhaI, M.HinP1I, M.Hpy99III, M.HpyAVIII, | GCGC | 2, 3 | m5C | GCGCAGCNNNNNNNN[NNNN], |
| BseKI, BseXI, | C | M.HpyUM032XV | | | | GCAGCGCNNNNNN[NNNN] |
| Bsp423I, Bst12I, | | | | | | |
| Bst71I, BstV1I, | | | | | | |
| GeoICI, Lsp11091 | | | | | | |
| AlwXI, BbvI, | GCAG | M.Hme33500II | HGCWGCK | 3 | m4C | MGCWGCAGCNNNNNNNN[NNNN], |
| BseKI, BseXI, | C | | | | | MGCAGCDNNNNNNN[NNNN], |
| Bsp423I, Bst12I, | | | | | | HGCAGCKNNNNNNN[NNNN], |
| Bst71I, BstV1I, | | | | | | GCAGCWGCKNNNN[NNNN] |
| GeoICI, Lsp11091 | | | | | | |
| AlwXI, BbvI, | GCAG | M.Hpy30X, M.Hpy57VIII, M.HpyFXI, M.MhuI | CTNAG | 1, 5 | m4C | CTNAGCAGCNNNNNNNN[NNNN], |
| BseKI, BseXI, | C | | | | | GCAGCTNAGNNNN[NNNN] |
| Bsp423I, Bst12I, | | | | | | |
| Bst71I, BstV1I, | | | | | | |
| GeoICI, Lsp1109I | | | | | | |
| AlwXI, BbvI, | GCAG | M.Hpy57X | CTRYAG | 2, 5 | m6A | CTGCAGCNNNNNNNN[NNNN] |
| BseKI, BseXI, | C | | | | | |
| Bsp423I, Bst12I, | | | | | | |
| Bst71I, BstV1I, | | | | | | |
| GeoICI, Lsp1109I | | | | | | |
| AlwXI, BbvI, | GCAG | M.Hpy99IV, M.HpyFORFX | CCNNGG | 1, 6 | m4C | CCNNGGCAGCNNNNNNNN[NNNN], |
| BseKI, BseXI, | C | | | | | GCAGCCNNGGNNN[NNNN] |
| Bsp423I, Bst12I, | | | | | | |
| Bst71I, BstV1I, | | | | | | |
| GeoICI, Lsp1109I | | | | | | |
| AlwXI, BbvI, | GCAG | M.HpyD27I | GAGG | 2, 4 | m6A, | GCAGCCTCNNNNN[NNNN], |
| BseKI, BseXI, | C | | | | m5C | GAGGCAGCNNNNNNNN[NNNN] |
| Bsp423I, Bst12I, | | | | | | |
| Bst71I, BstV1I, | | | | | | |
| GeoICI, Lsp1109I | | | | | | |
| AlwXI, BbvI, | GCAG | M.Mma5219II, M.TarMY3I | AGCT | 2, 3 | m4C | GCAGCTNNNNNNN[NNNN] |
| BseKI, BseXI, | C | | | | | |
| Bsp423I, Bst12I, | | | | | | |
| Bst71I, BstV1I, | | | | | | |
| GeoICI, Lsp1109I | | | | | | |
| AlwXI, BbvI, | GCAG | M.MpeII | RGCY | 2, 3 | m5C | GCAGCYNNNNNNN[NNNN] |
| BseKI, BseXI, | C | | | | | |
| Bsp423I, Bst12I, | | | | | | |
| Bst71I, BstV1I, | | | | | | |
| GeoICI, Lsp1109I | | | | | | |
| AlwXI, BbvI, | GCAG | M.Msp1II | CCAGG | 5 | m4C | GCAGCCTGGNNNN[NNNN], |
| BseKI, BseXI, | C | | | | | CCAGGCAGCNNNNNNNN[NNNN] |
| Bsp423I, Bst12I, | | | | | | |
| Bst71I, BstV1I, | | | | | | |
| GeoICI, Lsp1109I | | | | | | |
| AlwXI, BbvI, | GCAG | M.Msp42II | CCWGG | 1, 5 | m4C | CCWGGCAGCNNNNNNNN[NNNN], |
| BseKI, BseXI, | C | | | | | GCAGCCWGGNNNN[NNNN] |
| Bsp4231 Bst12I, | | | | | | |
| Bst71I, BstV1I, | | | | | | |
| GeoICI, Lsp1109I | | | | | | |
| AlwXI, BbvI, | GCAG | M.NgoAI | RGCGCY | 3, 4 | m5C | GCAGCGCYNNNNN[NNNN] |
| BseKI, BseXI, | C | | | | | |
| Bsp423I, Bst12I, | | | | | | |
| Bst71I, BstV1I, | | | | | | |
| GeoICI, Lsp1109I | | | | | | |
| AlwXI, BbvI, | GCAG | M.NheI | GCTAGC | 1, 6 | m4C | GCTAGCAGCNNNNNNNN[NNNN], |
| BseKI, BseXI, | C | | | | | GCAGCTAGCNNNN[NNNN] |
| Bsp423I, Bst12I, | | | | | | |
| Bst71I, BstV1I, | | | | | | |
| GeoICI, Lsp1109I | | | | | | |
| AlwXI, BbvI, | GCAG | M.Nme18V | GCGCGC | 2, 5 | m5C | GCGCGCAGCNNNNNNNN[NNNN], |
| BseKI, BseXI, | C | | | | | GCAGCGCGCNNNN[NNNN] |
| Bsp423I, Bst12I, | | | | | | |
| Bst71I, BstV1I, | | | | | | |
| GeoICI, Lsp1109I | | | | | | |
| AlwXI, BbvI, | GCAG | M.NmeDI | VCCGGY | 2, 5 | m5C | VCCGGCAGCNNNNNNNN[NNNN], |
| BseKI, BseXI, | C | | | | | GCAGCCGGBNNNN[NNNN] |
| Bsp423I, Bst12I, | | | | | | |
| Bst71I, BstV1I | | | | | | |
| GeoICI, Lsp1109I | | | | | | |
| AlwXI, BbvI, | GCAG | M.NmeMC58III | CCAGA | 1 | m5C | TCTGGCAGCNNNNNNNN[NNNN], |
| BseKI, BseXI, | C | | | | | GCAGCCAGANNNN[NNNN] |
| Bsp423I, Bst12I, | | | | | | |
| Bst71I, BstV1I, | | | | | | |
| GeoICI, Lsp1109I | | | | | | |
| AlwXI, BbvI, | GCAG | M.Nsp209III, M.Nsp51109II | CTCGAG | 1, 6 | m5C | CTCGAGCAGCNNNNNNNN[NNNN], |
| BseKI, BseXI, | C | | | | | GCAGCTCGAGNNN[NNNN] |
| Bsp423I, Bst12I, | | | | | | |
| Bst71I, BstV1I, | | | | | | |
| GeoICI, Lsp11091 | | | | | | |
| AlwXI, BbvI, | GCAG | M.NspI, M.NspHI | RCATGY | 2, 5 | m5C | RCATGCAGCNNNNNNNN[NNNN], |
| BseKI, BseXI, | C | | | | | GCAGCATGYNNNN[NNNN] |
| Bsp423I, Bst12I, | | | | | | |
| Bst71I, BstV1I, | | | | | | |
| GeoICI, Lsp1109I | | | | | | |
| AlwXI, BbvI, | GCAG | M.Pae10332II, M1.Pae50071I, | CAGCTC | 3, 4 | m4C | GCAGCTCNNNNNN[NNNN] |
| BseKI, BseXI, | C | M2.Pae50071I | | | | |
| Bsp423I, Bst12I, | | | | | | |
| Bst71I, BstV1I, | | | | | | |
| GeoICI, Lsp1109I | | | | | | |
| AlwXI, BbvI, | GCAG | M.Pam7686I | CCATGG | 1, 6 | m5C | CCATGGCAGCNNNNNNNN[NNNN], |
| BseKI, BseXI, | C | | | | | GCAGCCATGGNNN[NNNN] |
| Bsp423I, Bst12I, | | | | | | |
| Bst71I, BstV1I, | | | | | | |
| GeoICI, Lsp11091 | | | | | | |
| AlwXI, BbvI, | GCAG | M.Pfa23572II | CGATCG | 1, 6 | m5C | CGATCGCAGCNNNNNNNN[NNNN], |
| BseKI, BseXI, | C | | | | | GCAGCGATCGNNN[NNNN] |
| Bsp423I, Bst12I, | | | | | | |
| Bst71I, BstV1I, | | | | | | |
| GeoICI, Lsp11091 | | | | | | |
| AlwXI, BbvI, | GCAG | M.Pla5I | CTAG | 1, 4 | Unknown | CTAGCAGCNNNNNNNN[NNNN], |
| BseKI, BseXI, | C | | | | | GCAGCTAGNNNNN[NNNN] |
| Bsp423I, Bst12I, | | | | | | |
| Bst71I, BstV1I, | | | | | | |
| GeoICI, Lsp1109I | | | | | | |
| AlwXI, BbvI, | GCAG | M.Sam53668II | CCATGG | 1, 6 | Unknown | CCATGGCAGCNNNNNNNN[NNNN], |
| BseKI, BseXI, | C | | | | | GCAGCCATGGNNN[NNNN] |
| Bsp423I, Bst12I, | | | | | | |
| Bst71I, BstV1I, | | | | | | |
| GeoICI, Lsp1109I | | | | | | |
| AlwXI, BbvI, | GCAG | M.SbaUII | CAGCTG | 2, 5 | m6A | GCAGCTGNNNNNN[NNNN] |
| BseKI, BseXI, | C | | | | | |
| Bsp423I, Bst12I, | | | | | | |
| Bst71I, BstV1I, | | | | | | |
| GeoICI, Lsp1109I | | | | | | |
| AlwXI, BbvI, | GCAG | M.Sen1781III | CCWWGG | 1, 6 | Unknown | CCWWGGCAGCNNNNNNNN[NNNN], |
| BseKI, BseXI, | C | | | | | GCAGCCWWGGNNN[NNNN] |
| Bsp423I Bst12I, | | | | | | |
| Bst71I, BstV1I, | | | | | | |
| GeoICI, Lsp1109I | | | | | | |
| AlwXI, BbvI, | GCAG | M.SonIII | GCANNNN | 3, 9 | m6A | GCAGCNNGTCNNN[NNNN] |
| BseKI, BseXI, | C | | GTC | | | |
| Bsp423I, Bst12I, | | | | | | |
| Bst71I, BstV1I, | | | | | | |
| GeoICI, Lsp11091 | | | | | | |
| AlwXI, BbvI, | GCAG | M.TdeII | CTCTTC | 1, 2 | m4C, | GAAGAGCAGCNNNNNNNN[NNNN], |
| BseKI, BseXI, | C | | | | m6A | GCAGCTCTTCNNN[NNNN] |
| Bsp423I, Bst12I, | | | | | | |
| Bst71I, BstV1I, | | | | | | |
| GeoICI, Lsp1109I | | | | | | |
| AlwXI, BbvI, | GCAG | M.TspRI | CASTG | 1, 5 | m5C | CASTGCAGCNNNNNNNN[NNNN], |
| BseKI, BseXI, | C | | | | | GCAGCASTGNNNN[NNNN] |
| Bsp423I, Bst12I, | | | | | | |
| Bst71I, BstV1I, | | | | | | |
| GeoICI, Lsp1109I | | | | | | |
| AlwXI, BbvI, | GCAG | M.Yen2516I | GCGCGC | 2, 5 | Unknown | GCGCGCAGCNNNNNNNN[NNNN], |
| BseKI, BseXI, | C | | | | | GCAGCGCGCNNNN[NNNN] |
| Bsp423I, Bst12I, | | | | | | |
| Bst71I, BstV1I, | | | | | | |
| GeoICI, Lsp11091 | | | | | | |
| AlwXI, BbvI, | GCAG | M1.AgoG2I, M2.AgoG2I | CCAGT | 1, 4 | m4C | ACTGGCAGCNNNNNNNN[NNNN], |
| BseKI, BseXI, | C | | | | | GCAGCCAGTNNNN[NNNN] |
| Bsp423I, Bst12I, | | | | | | |
| Bst71I, BstV1I, | | | | | | |
| GeoICI, Lsp1109I | | | | | | |
| AlwXI, BbvI, | GCAG | M1.BspACI | CCGC | 1 | m5C | GCGGCAGCNNNNNNNN[NNNN], |
| BseKI, BseXI, | C | | | | | GCAGCCGCNNNNN[NNNN] |
| Bsp423I, Bst12I, | | | | | | |
| Bst71I, BstV1I, | | | | | | |
| GeoICI, Lsp1109I | | | | | | |
| AlwXI, BbvI, | GCAG | M1.HgaI, M2.LlaJI | GCGTC | 2 | m5C | GACGCAGCNNNNNNNN[NNNN], |
| BseKI, BseXI, | C | | | | | GCAGCGTCNNNNN[NNNN] |
| Bsp423I, Bst12I, | | | | | | |
| Bst71I, BstV1I, | | | | | | |
| GeoICI, Lsp1109I | | | | | | |
| AlwXI BbvI | GCAG | M1.LplAG30I | GAAGG | 5 | m5C | GCAGCCTTCNNNN[NNNN], |
| BseKI, BseXI, | C | | | | | GAAGGCAGCNNNNNNNN[NNNN] |
| Bsp423I, Bst12I, | | | | | | |
| Bst71I, BstV1I, | | | | | | |
| GeoICI, Lsp1109I | | | | | | |
| AlwXI, BbvI, | GCAG | M1.Sgr13350III, M2.Sgr13350III | GCTCTTC | 2, 3 | m4C, | GAAGAGCAGCNNNNNNNN[NNNN], |
| BseKI, BseXI, | C | | | | m6A | GCAGCTCTTCNNN[NNNN] |
| Bsp423I, Bst12I, | | | | | | |
| Bst71I, BstV1I, | | | | | | |
| GeoICI, Lsp1109I | | | | | | |
| AlwXI, BbvI | GCAG | M2.BceSIII, M1.Pru9I, M2.Pru9I | ACGGC | 2, 4 | m4C | GCAGCCGTNNNNN[NNNN], |
| BseKI, BseXI, | C | | | | | ACGGCAGCNNNNNNNN[NNNN] |
| Bsp423I, Bst12I, | | | | | | |
| Bst71I, BstV1I, | | | | | | |
| GeoICI, Lsp1109I | | | | | | |
| AlwXI, BbvI, | GCAG | M2.HpyAVI, M1.MnlI | GAGG | 4 | m5C | GCAGCCTCNNNNN[NNNN], |
| BseKI, BseXI, | C | | | | | GAGGCAGCNNNNNNNN[NNNN] |
| Bsp423I, Bst12I, | | | | | | |
| Bst71I, BstV1I, | | | | | | |
| GeoICI, Lsp1109I | | | | | | |
| BmsI, BspST5I, | GCAT | M.AbaBs12I, M.Awo1030I, M.Cdu23823I, | CCWGG | 1, 5 | m5C | CCWGGCATCNNNNN[NNNN], |
| LweI, PhaI, SfaNI | C | M.Csa8155II, M.Cun9529I, M.EasL1Dcm, | | | | GCATCCWGGN[NNNN] |
| | | M.Eba57Dcm, M.Ec134399Dcm, | | | | |
| | | M.Eco12761Dcm, M.Eco3609Dcm, | | | | |
| | | M.Eco4255Dcm, M.EcoVR50Dcm, | | | | |
| | | M.EsaSP1II, M.Kpn34618Dcm, | | | | |
| | | M.Kpn38547Dcm, M.Kpn39I, M.Kpn43816I, | | | | |
| | | M.Kpn677ORFDcm, M.Kpn928Dcm, | | | | |
| | | M.KpnNIH1Dcm, M.KpnNIH10Dcm, | | | | |
| | | M.KpnNIH30Dcm, M.Kva120Dcm, M.Lsp48I, | | | | |
| | | M.Pmi1I, M.SpaD2III, M.SplRp8II, | | | | |
| | | M.SptADcm, M.Tsu2489III | | | | |
| BmsI, BspST5I, | GCAT | M.AciI | CCGC | 1, 3 | m5C | GCGGCATCNNNNN[NNNN], |
| LweI, PhaI, SfaNI | C | | | | | CCGCATCNNNNN[NNNN], |
| | | | | | | GCATCCGCNN[NNNN] |
| BmsI, BspST5I, | GCAT | M.Ama55I, M.CnaPQ2III, M.Rmo1926II, | CGGCCG | 1, 6 | m5C | CGGCCGCATCNNNNN[NNNN], |
| LweI, PhaI, SfaNI | C | M.SenC1765IV, M.SspG1I, M.XorPXII | | | | GCATCGGCCG[NNNN] |
| BmsI, BspST5I, | GCAT | M.AquI | CYCGRG | 1, 6 | m5C | CYCGRGCATCNNNNN[NNNN], |
| LweI, PhaI, SfaNI | C | | | | | GCATCYCGRG[NNNN] |
| BmsI, BspST5I, | GCAT | M.AsiSI | GCGATCGC | 2, 7 | m5C | GCGATCGCATCNNNNN[NNNN] |
| LweI, PhaI, SfaNI | C | | | | | |
| BmsI, BspST5I, | GCAT | M.AvaIX, M.Cfr10I, M.Nme18VI, M.VchAI, | RCCGGY | 2, 5 | m5C | RCCGGCATCNNNNN[NNNN] |
| LweI, PhaI, SfaNI | C | M.Vch0395I | | | | |
| BmsI, BspST5I, | GCAT | M.BamWS8I, M.CthV, M.EfaRFI, M.Saf8902II, | GCWGC | 2, 4 | m5C | GCWGCATCNNNNN[NNNN] |
| LweI, PhaI, SfaNI | C | M.TacII, M.TcoKWC4III | | | | |
| BmsI, BspST5I, | GCAT | M.BbvI, M.BceSIV | GCAGC | 2, 4 | m5C | GCTGCATCNNNNN[NNNN], |
| LweI, PhaI, SfaNI | C | | | | | GCAGCATCNNNNN[NNNN] |
| BmsI, BspST5I, | GCAT | M.BcoSlacII, M.MspLW5III, M.Nbr128I, | CTCGAG | 1, 6 | m4C | CTCGAGCATCNNNNN[NNNN], |
| LweI, PhaI, SfaNI | C | M.Psy18884II, M.Tam77409II, M.TbrGE1II, | | | | GCATCTCGAG[NNNN] |
| | | M.TpaRLII | | | | |
| BmsI, BspST5I, | GCAT | M.BepI, M.FpsJV, M.Gel16401III, M.Pdi8503I | CGCG | 1, 4 | m5C | CGCGCATCNNNNN[NNNN], |
| LweI, PhaI, SfaNI | C | | | | | GCATCGCGNN[NNNN] |
| BmsI, BspST5I, | GCAT | M.BfaSIII, M.Ccl10114I, M.CfrB38I, | ATGCAT | 2, 5 | m6A | ATGCATCNNNNN[NNNN] |
| LweI, PhaI, SfaNI | C | M.CfrH1I, M.EcoGVI, M.EcoKII, | | | | |
| | | M.Fnu10562II, M.SbaUIV, M.Sbo12419III, | | | | |
| | | M.Sbo268II, M.Sen10384II, M.Sen10708II, | | | | |
| | | M.Sen1080II, M.Sen1175III, M.Sen13IV, | | | | |
| | | M.Sen13311IV, M.Sen1387II, M.Sen1427III, | | | | |
| | | M.Sen14882III, M.Sen15791III, M.Sen158III, | | | | |
| | | M.Sen16I, M.Sen1655III, M.Sen1676III, | | | | |
| | | M.Sen1677III, M.Sen1728III, M.Sen1735III, | | | | |
| | | M.Sen1736IV, M.Sen1764III, M.Sen1766III, | | | | |
| | | M.Sen1781IV, M.Sen1783III, M.Sen18569II, | | | | |
| | | M.Sen1878III, M.Sen1880III, M.Sen1896III, | | | | |
| | | M.Sen1898III, M.Sen1899III, M.Sen1903III, | | | | |
| | | M.Sen1906III, M.Sen1908III, M.Sen1910III, | | | | |
| | | M.Sen1921III, M.Sen1927II, M.Sen195II, | | | | |
| | | M.Sen2050II, M.Sen2064III, M.Sen2069III, | | | | |
| | | M.Sen22462I, M.Sen255II, M.Sen318III, | | | | |
| | | M.Sen3387III, M.Sen3890III, M.Sen483III, | | | | |
| | | M.Sen624III, M.Sen641III, M.Sen7378II, | | | | |
| | | M.Sen8391III, M.Sen8692III, M.SenA46III, | | | | |
| | | M.SenAbaII, M.SenAboII, M.SenAnaIII, | | | | |
| | | M.SenC1736III, M.SenC1765III, | | | | |
| | | M.SenC1808IV, M.SenC1810III, M.SenJIII, | | | | |
| | | M.SenL1II, M.SenL15III, M.SenN1660II, | | | | |
| | | M.SenSARA26II, M.SenSPBIII, M.SenTFIII | | | | |
| BmsI, BspST5I, | GCAT | M.BglI, M.CagI, M.DdeVCDI, M.GsuRed1I | GCCNNNN | 2, 10 | m4C | GCCNNNNNGGCATCNNNNN[NNNN] |
| LweI, PhaI, SfaNI | C | | NGGC | | | |
| BmsI, BspST5I, | GCAT | M.BseCI, M.ClaI, M.MfoCT6III, M.Nfa11134I, | ATCGAT | 2, 5 | m6A | GCATCGATNN[NNNN] |
| LweI, PhaI, SfaNI | C | M.Nsp209I, M.Nsp51109I, M.Pfu17724II, | | | | |
| | | M.SonI | | | | |
| BmsI, BspST5I, | GCAT | M.BsoBI | CYCGRG | 1, 6 | m4C | CYCGRGCATCNNNNN[NNNN], |
| LweI, PhaI, SfaNI | C | | | | | GCATCYCGRG[NNNN] |
| BmsI, BspST5I, | GCAT | M.BsuFI, M.CpeAIV, M.MspI | CCGG | 1, 4 | m5C | CCGGCATCNNNNN[NNNN], |
| LweI, PhaI, SfaNI | C | | | | | GCATCCGGNN[NNNN] |
| BmsI, BspST5I, | GCAT | M.Cab13497I, M.Dac11109III, M.Dco13527I, | CTAG | 1, 4 | m4C | CTAGCATCNNNNN[NNNN], |
| LweI, PhaI, SfaNI | C | M.Djo10085I, M.Hbo11551I, M.Hka19301III, | | | | GCATCTAGNN[NNNN] |
| | | M.Hme33500I, M.HsaR1I, M.Hsi33800I, | | | | |
| | | M.Hsp KM1WII, M.HspNII, M.HtuI, M.HvoDSI, | | | | |
| | | M.Lba2029II, M.Mbo45II, M.MjaI, M.MthZI, | | | | |
| | | M.Nas12278I, M.Rfl3010I, M.SsmMI | | | | |
| BmsI, BspST5I, | GCAT | M.Cac8I | GCNNGC | 2, 5 | m5C | GCNNGCATCNNNNN[NNNN] |
| LweI, PhaI, SfaNI | C | | | | | |
| BmsI, BspST5I, | GCAT | M.CagVI | TCCGGA | 1, 6 | m6A | GCATCCGGAN[NNNN] |
| LweI, PhaI, SfaNI | C | | | | | |
| BmsI, BspST5I, | GCAT | M.CcrNAV | YGCCGGCR | 3, 6 | m5C | YGCCGGCATCNNNNN[NNNN] |
| LweI, PhaI, SfaNI | C | | | | | |
| BmsI, BspST5I, | GCAT | M.Cdi630IV, M.Ckr177III, M.CmaLM2II, | GCNGC | 2, 4 | m5C | GCNGCATCNNNNN[NNNN] |
| LweI, PhaI, SfaNI | C | M.CocII, M.Fnu4HI, M.Fsp4HI | | | | |
| BmsI, BspST5I, | GCAT | M.CfrBI, M.Sen1735IV, M.SenAnaIV | CCWWGG | 1, 6 | m4C | CCWWGGCATCNNNNN[NNNN], |
| LweI, PhaI, SfaNI | C | | | | | GCATCCWWGG[NNNN] |
| BmsI, BspST5I, | GCAT | M.Cmu51329I, M.EcoJA03PDcm, | CCWGG | 1, 5 | Unknown | CCWGGCATCNNNNN[NNNN], |
| LweI, PhaI, SfaNI | C | M.RorR1Dcm, M.Sen8391 Dcm, M.ZalSM2II | | | | GCATCCWGGN[NNNN] |
| BmsI, BspST5I, | GCAT | M.CsiFSMII, M.MfoCT6IV, M.NgoAIV, | GCCGGC | 2, 5 | m5C | GCCGGCATCNNNNN[NNNN] |
| LweI, PhaI, SfaNI | C | M.NgoMIV, M1.Sgr13350II | | | | |
| BmsI, BspST5I, | GCAT | M.CviQIII, M.CviSIII, M.Hpy299XI, | TCGA | 1, 4 | m6A | GCATCGANNN[NNNN] |
| LweI, PhaI, SfaNI | C | M.Hpy30II, M.Hpy32X, M.Hpy99VII, | | | | |
| | | M.HpyAX, M.HpyFII, M.HpyUM032XVII, | | | | |
| | | M.Tam77409III, M.TaqI, M.TpaRLI, | | | | |
| | | M.Tth HB8I | | | | |
| BmsI, BspST5I, | GCAT | M.CviRI, M.Hpy298VIII, M.Hpy299VIII, | TGCA | 1, 4 | m6A | TGCATCNNNNN[NNNN] |
| LweI, PhaI, SfaNI | C | M.Hpy30VI, M.Hpy32V, M.Hpy57II, | | | | |
| | | M.Hpy66VIII, M.HpyFVI, M.HpyUM032VIII, | | | | |
| | | M.HpyUM037VIII | | | | |
| BmsI, BspST5I, | GCAT | M.Ddel | CTNAG | 1, 5 | m5C | CTNAGCATCNNNNN[NNNN], |
| LweI, PhaI, SfaNI | C | | | | | GCATCTNAGN[NNNN] |
| BmsI, BspST5I, | GCAT | M.FatI | CATG | 1, 4 | m5C | CATGCATCNNNNN[NNNN], |
| LweI, PhaI, SfaNI | C | | | | | GCATCATGNN[NNNN] |
| BmsI, BspST5I, | GCAT | M.FisAW1I, M.ThaI, M.Tph12270II | CGCG | 1, 4 | m4C | CGCGCATCNNNNN[NNNN], |
| LweI, PhaI, SfaNI | C | | | | | GCATCGCGNN[NNNN] |
| BmsI, BspST5I, | GCAT | M.FnoB1II, M.Hal24586I, M.Hpy298V, | CCGG | 1, 4 | m4C | CCGGCATCNNNNN[NNNN], |
| LweI, PhaI, SfaNI | C | M.Hpy299IX, M.Hpy30V, M.Hpy32XI, | | | | GCATCCGGNN[NNNN] |
| | | M.Hpy57V, M.Hpy66IX, M.Hpy99VIII, | | | | |
| | | M.HpyFV, M.HpyUM032IX, M.HpyUM037IX, | | | | |
| | | M.MjaVI, M.PspJDRI, M.TmeBII | | | | |
| BmsI, BspST5I, | GCAT | M.HhaI, M.HinP1I, M.Hpy99III, M.HpyAVIII, | GCGC | 2, 3 | m5C | GCGCATCNNNNN[NNNN] |
| LweI, PhaI, SfaNI | C | M.HpyUM032XV | | | | |
| BmsI, BspST5I, | GCAT | M.Hka19301IV | TCGCGA | 2, 5 | m4C | GCATCGCGAN[NNNN] |
| LweI, PhaI, SfaNI | C | | | | | |
| BmsI, BspST5I, | GCAT | M.Hme33500II | MGCWGCD | 5 | m4C | MGCWGCATCNNNNN[NNNN] |
| LweI, PhaI, SfaNI | C | | | | | |
| BmsI, BspST5I, | GCAT | M.Hpy188I, M.Hpy298IX, M.Hpy299V, | TCNGA | 1, 5 | m6A | GCATCNGANN[NNNN] |
| LweI, PhaI, SfaNI | C | M.Hpy66V, M.HpyUM032V | | | | |
| BmsI, BspST5I, | GCAT | M.Hpy30VIII, M.Hpy32VIII, M.Hpy57III, | TCNNGA | 1, 6 | m6A | GCATCNNGAN[NNNN] |
| LweI, PhaI, SfaNI | C | M.Hpy66VI, M.Hpy99XVIII, M.HpyFVIII, | | | | |
| | | M.HpyPVIII | | | | |
| BmsI, BspST5I, | GCAT | M.Hpy30X, M.Hpy57VIII, M.HpyFXI, M.MhuI | CTNAG | 1, 5 | m4C | CTNAGCATCNNNNN[NNNN], |
| LweI, PhaI, SfaNI | C | | | | | GCATCTNAGN[NNNN] |
| BmsI, BspST5I, | GCAT | M.Hpy99IV, M.HpyFORFX | CCNNGG | 1, 6 | m4C | CCNNGGCATCNNNNN[NNNN], |
| LweI, PhaI, SfaNI | C | | | | | GCATCCNNGG[NNNN] |
| BmsI, BspST5I, | GCAT | M.HpyD27I | GAGG | 2, 4 | m6A, | GCATCCTCNN[NNNN], |
| LweI, PhaI, SfaNI | C | | | | m5C | GAGGCATCNNNNN[NNNN] |
| BmsI, BspST5I, | GCAT | M.Lph145I, M.Lph93I | TCWCC | 1 | m6A | GCATCWCCNN[NNNN] |
| LweI, PhaI, SfaNI | C | | | | | |
| BmsI, BspST5I, | GCAT | M.Msp1II | CCAGG | 5 | m4C | GCATCCTGGN[NNNN], |
| LweI, PhaI, SfaNI | C | | | | | CCAGGCATCNNNNN[NNNN] |
| BmsI, BspST5I, | GCAT | M.Msp42II | CCWGG | 1, 5 | m4C | CCWGGCATCNNNNN[NNNN], |
| LweI, PhaI, SfaNI | C | | | | | GCATCCWGGN[NNNN] |
| BmsI, BspST5I, | GCAT | M.NheI | GCTAGC | 1, 6 | m4C | GCTAGCATCNNNNN[NNNN] |
| LweI, PhaI, SfaNI | C | | | | | |
| BmsI, BspST5I, | GCAT | M.Nme18III | TCTGG | 2, 4 | m5C | GCATCTGGNN[NNNN] |
| LweI, PhaI, SfaNI | C | | | | | |
| BmsI, BspST5I, | GCAT | M.Nme18V | GCGCGC | 2, 5 | m5C | GCGCGCATCNNNNN[NNNN] |
| LweI, PhaI, SfaNI | C | | | | | |
| BmsI, BspST5I, | GCAT | M.NmeDI | VCCGGY | 2, 5 | m5C | VCCGGCATCNNNNN[NNNN] |
| LweI, PhaI, SfaNI | C | | | | | |
| BmsI, BspST5I, | GCAT | M.NmeMC58III | CCAGA | 1 | m5C | TCTGGCATCNNNNN[NNNN], |
| LweI, PhaI, SfaNI | C | | | | | GCATCCAGAN[NNNN] |
| BmsI, BspST5I, | GCAT | M.Nsp209III, M.Nsp51109II | CTCGAG | 1, 6 | m5C | CTCGAGCATCNNNNN[NNNN], |
| LweI, PhaI, SfaNI | C | | | | | GCATCTCGAG[NNNN] |
| BmsI, BspST5I, | GCAT | M.NspI, M.NspHI | RCATGY | 2, 5 | m5C | RCATGCATCNNNNN[NNNN] |
| LweI, PhaI, SfaNI | C | | | | | |
| BmsI, BspST5I, | GCAT | M.Pam7686I | CCATGG | 1, 6 | m5C | CCATGGCATCNNNNN[NNNN], |
| LweI, PhaI, SfaNI | C | | | | | GCATCCATGG[NNNN] |
| BmsI, BspST5I, | GCAT | M.Pfa23572II | CGATCG | 1, 6 | m5C | CGATCGCATCNNNNN[NNNN], |
| LweI, PhaI, SfaNI | C | | | | | GCATCGATCG[NNNN] |
| BmsI, BspST5I, | GCAT | M.Pla5I | CTAG | 1, 4 | Unknown | CTAGCATCNNNNN[NNNN], |
| LweI, PhaI, SfaNI | C | | | | | GCATCTAGNN[NNNN] |
| BmsI, BspST5I, | GCAT | M.Sam53668II | CCATGG | 1, 6 | Unknown | CCATGGCATCNNNNN[NNNN], |
| LweI, PhaI, SfaNI | C | | | | | GCATCCATGG[NNNN] |
| BmsI, BspST5I, | GCAT | M.Sen1781III | CCWWGG | 1, 6 | Unknown | CCWWGGCATCNNNNN[NNNN], |
| LweI, PhaI, SfaNI | C | | | | | GCATCCWWGG[NNNN] |
| BmsI, BspST5I, | GCAT | M.SmoLVI, M.Spn23FII, M.Spn556I, | TCTAGA | 1, 6 | m6A | GCATCTAGAN[NNNN] |
| LweI, PhaI, SfaNI | C | M.Spn7465I, M.SpnRI, M.XbaI | | | | |
| BmsI, BspST5I, | GCAT | M.SonIII | GCANNNN | 3, 9 | m6A | GCATCNNGTC[NNNN] |
| LweI, PhaI, SfaNI | C | | GTC | | | |
| BmsI, BspST5I, | GCAT | M.TdeII | CTCTTC | 1, 2 | m4C, | GAAGAGCATCNNNNN[NNNN], |
| LweI, PhaI, SfaNI | C | | | | m6A | GCATCTCTTC[NNNN] |
| BmsI, BspST5I, | GCAT | M.TspRI | CASTG | 1, 5 | m5C | CASTGCATCNNNNN[NNNN], |
| LweI, PhaI, SfaNI | C | | | | | GCATCASTGN[NNNN] |
| BmsI, BspST5I, | GCAT | M.Yen2516I | GCGCGC | 2, 5 | Unknown | GCGCGCATCNNNNN[NNNN] |
| LweI, PhaI, SfaNI | C | | | | | |
| BmsI, BspST5I, | GCAT | M1.AgoG2I, M2.AgoG2I | CCAGT | 1, 4 | m4C | ACTGGCATCNNNNN[NNNN], |
| LweI, PhaI, SfaNI | C | | | | | GCATCCAGTN[NNNN] |
| BmsI, BspST5I, | GCAT | M1.BspACI | CCGC | 1 | m5C | GCGGCATCNNNNN[NNNN], |
| LweI, PhaI, SfaNI | C | | | | | GCATCCGCNN[NNNN] |
| BmsI, BspST5I, | GCAT | M1.BstF5I, M3.BstF5I, M2.Csp12AI | CATCC | 3 | m6A | GCATCCNNNN[NNNN] |
| LweI, PhaI, SfaNI | C | | | | | |
| BmsI, BspST5I, | GCAT | M1.HgaI, M2.LlaJI | GACGC | 4 | m5C | GACGCATCNNNNN[NNNN] |
| LweI, PhaI, SfaNI | C | | | | | |
| BmsI, BspST5I, | GCAT | M1.HphI | TCACC | 2 | m5C | GCATCACCNN[NNNN] |
| LweI, PhaI, SfaNI | C | | | | | |
| BmsI, BspST5I, | GCAT | M1.Hpy32II | TCYYC | 1 | m6A | GCATCYYCNN[NNNN] |
| LweI, PhaI, SfaNI | C | | | | | |
| BmsI, BspST5I, | GCAT | M1.HpyAII, M1.MboII, M1.NcuI | TCTTC | 1 | m6A | GCATCTTCNN[NNNN] |
| LweI, PhaI, SfaNI | C | | | | | |
| BmsI, BspST5I, | GCAT | M1.LplAG30I | GAAGG | 5 | m5C | GCATCCTTCN[NNNN], |
| LweI, PhaI, SfaNI | C | | | | | GAAGGCATCNNNNN[NNNN] |
| BmsI, BspST5I, | GCAT | M1.Sgr13350III, M2.Sgr13350III | GAAGAGC | 5, 6 | m6A, | GAAGAGCATCNNNNN[NNNN] |
| LweI, PhaI, SfaNI | C | | | | m4C | |
| BmsI, BspST5I, | GCAT | M2.BceSIII, M1.Pru9I, M2.Pru91 | ACGGC | 2, 4 | m4C | ACGGCATCNNNNN[NNNN] |
| LweI, PhaI, SfaNI | C | | | | | |
| BmsI, BspST5I, | GCAT | M2.BstF5I | CATCC | 2 | m6A | GCATCCNNNN[NNNN] |
| LweI, PhaI, SfaNI | C | | | | | |
| BmsI, BspST5I, | GCAT | M2.ClaSBI, M1.Fli6794IV, M2.HphI, | TCACC | 1 | m6A | GCATCACCNN[NNNN] |
| LweI, PhaI, SfaNI | C | M2.Ngo3502II, M1.Ngo6140II, M1.NgoAXVI, | | | | |
| | | M1.NgoBVIII, M1.NgoFA19I, M2.NgoMVIII, | | | | |
| | | M2.PspHUN102I, M1.Ssp10II | | | | |
| BmsI, BspST5I, | GCAT | M2.Hpy32II, M2.HpyAII, M2.MboII, M2.NcuI | TCTTC | 2 | m4C | GCATCTTCNN[NNNN] |
| LweI, PhaI, SfaNI | C | | | | | |
| BmsI, BspST5I, | GCAT | M2.HpyAVI, M1.MnlI | GAGG | 4 | m5C | GCATCCTCNN[NNNN], |
| LweI, PhaI, SfaNI | C | | | | | GAGGCATCNNNNN[NNNN] |
| BmsI, BspST5I, | GCAT | M4.BstF5I, M1.Cin755I, M2.Cin755I, | CATCC | 2, 3 | m6A | GCATCCNNNN[NNNN] |
| LweI, PhaI, SfaNI | C | M1.CmeSR3I, M2.CmeSR3I, M1.Csp12AI, | | | | |
| | | M1.Csp323I, M2.Csp323I, M1.Csp410I, | | | | |
| | | M2.Csp410I, M.FokI, M1.Msp315I, | | | | |
| | | M2.Msp315I, M.Sau13435I, M.StsI, | | | | |
| | | M1.Tsu2489IV, M2.Tsu2489IV, | | | | |
| | | M3.Tsu2489IV | | | | |
| BpuSI, BslFI, | GGGA | M.AatII, M.Lsp6406III | GACGTC | 2, 5 | m6A | GGGACGTCNNNNNNN[NNNN] |
| BsmFI | C | | | | | |
| BspLU11III, | | | | | | |
| BstOZ616I, FaqI | | | | | | |
| BpuSI, BslFI, | GGGA | M.AbaBs12I, M.Awo1030I, M.Cdu23823I, | CCWGG | 1, 5 | m5C | CCWGGGGACNNNNNNNNNN[NNNN], |
| BsmFI | C | M.Csa8155II, M.Cun9529I, M.EasL1Dcm, | | | | CCWGGGACNNNNNNNNNN[NNNN], |
| BspLU11III, | | M.Eba57Dcm, M.Ec134399Dcm, | | | | GGGACCWGGNNNNNN[NNNN] |
| BstOZ616I, FaqI | | M.Eco12761Dcm, M.Eco3609Dcm, | | | | |
| | | M.Eco4255Dcm, M.EcoVR50Dcm, | | | | |
| | | M.EsaSP1II, M.Kpn34618Dcm, | | | | |
| | | M.Kpn38547Dcm, M.Kpn39I, M.Kpn43816I, | | | | |
| | | M.Kpn677ORFDcm, M.Kpn928Dcm, | | | | |
| | | M.KpnNIH1Dcm, M.KpnNIH10Dcm, | | | | |
| | | M.KpnNIH30Dcm, M.Kva120Dcm, M.Lsp48I, | | | | |
| | | M.Pmi1I, M.SpaD2III, M.SplRp8II, | | | | |
| | | M.SptADcm, M.Tsu2489III | | | | |
| BpuSI, BslFI, | GGGA | M.AbrSp7I, M.Apa101655II, M.Ath21654I, | GANTC | 2, 4 | m6A | GGGACTCNNNNNNNN[NNNN] |
| BsmFI, | C | M.BdiNK6I, M.Bel76I, M.Bsp460I, | | | | |
| BspLU11III, | | M.BspJKG1II, M.BspLA1II, M.BspRAC04II, | | | | |
| BstOZ616I, FaqI | | M.CagII, M.CcrMI, M.CcrNAI, M.CnaPQ2I, | | | | |
| | | M.Csp16704III, M.CspNS6I, M.CviBI, | | | | |
| | | M.CviQVI, M.Eli8509I, M.Fnu419I, M.Fsp71I, | | | | |
| | | M.HbaI, M.HhaII, M.HinfI, M.HinHia1I, | | | | |
| | | M.Hpy298IV, M.Hpy299IV, M.Hpy32IV, | | | | |
| | | M.Hpy57IV, M.Hpy66IV, M.Hpy99IX, | | | | |
| | | M.HpyAIV, M.Hpy FIV, M.HpyUM032IV, | | | | |
| | | M.HpyUM037IV, M.Mbo45III, M.Msp10I, | | | | |
| | | M.Msp73BI, M.MspAL11I, M.MspLW5II, | | | | |
| | | M.NhaXII, M.NpeUS61I, M.OspHL35I, | | | | |
| | | M.Pin17395II, M.Pla5III, M.PspLM6I, | | | | |
| | | M.RbaNRL2I, M.Rgi145II, M.Rmo1926I, | | | | |
| | | M.RpaIII, M.RsaII, M.RshIII, M.Rsp8I, | | | | |
| | | M.SmeC3I, M.SmoLV, M.Sna24252I, | | | | |
| | | M.SscL1I, M.SspM41II, M.SstE37II, M.ThaIII, | | | | |
| | | M.Xsp91I, M.ZmoCP4I | | | | |
| BpuSI, BsIFI, | GGGA | M.AciI | CCGC | 1, 3 | m5C | GCGGGGACNNNNNNNNNN[NNNN], |
| BsmFI, | C | | | | | GCGGGACNNNNNNNNNN[NNNN], |
| BspLU11III, | | | | | | GGGACCGCNNNNNNN[NNNN] |
| BstOZ616I, FaqI | | | | | | |
| BpuSI, BsIFI, | GGGA | M.AflIII | ACRYGT | 2, 5 | m4C | GGGACRYGTNNNNNN[NNNN] |
| BsmFI, | C | | | | | |
| BspLU11III, | | | | | | |
| BstOZ616I, FaqI | | | | | | |
| BpuSI, BslFI, | GGGA | M.AhdI | GACNNNN | 2, 10 | m6A | GGGACNNNNNGTCNN[NNNN] |
| BsmFI, | C | | NGTC | | | |
| BspLU11III, | | | | | | |
| BstOZ616I, FaqI | | | | | | |
| BpuSI, Bs1FI, | GGGA | M.Ama55I, M.CnaPQ2III, M.Rmo1926II, | CGGCCG | 1, 6 | m5C | CGGCCGGGACNNNNNNNNNN[NNNN], |
| BsmFI, | C | M.SenC1765IV, M.SspG1I, M.XorPXII | | | | GGGACGGCCGNNNNN[NNNN] |
| BspLU11III, | | | | | | |
| BstOZ616I, FaqI | | | | | | |
| BpuSI, BslFI, | GGGA | M.AquI | CYCGRG | 1, 6 | m5C | CYCGRGGGACNNNNNNNNNN[NNNN], |
| BsmFI, | C | | | | | CYCGGGGACNNNNNNNNNN[NNNN], |
| BspLU11III, | | | | | | CYCGGGACNNNNNNNNNN[NNNN], |
| BstOZ616I, FaqI | | | | | | GGGACYCGRGNNNNN[NNNN] |
| BpuSI, BslFI, | GGGA | M.AspU41II, M.BisIII, M.BsuW23II, | CCWGG | 2, 4 | m5C | CCWGGGACNNNNNNNNNN[NNNN] |
| BsmFI, | C | M.CnaPQ2II, M.EcoO6Dcm, M.Eco12581Dcm, | | | | |
| BspLU11III, | | M.Eco1655Dcm, M.Eco29787Dcm, | | | | |
| BstOZ616I, FaqI | | M.Eco3024Dcm, M.Eco3317Dcm, | | | | |
| | | M.Eco3325Dcm, M.Eco3740Dcm, | | | | |
| | | M.Eco3911Dcm, M.Eco4211Dcm, | | | | |
| | | M.Eco4465Dcm, M.Eco600Dcm, | | | | |
| | | M.Eco644Dcm, M.Eco86Dcm, | | | | |
| | | M.Eco9001Dcm, M.Eco9387Dcm, | | | | |
| | | M.EcoE1140Dcm, M.EcoE455Dcm, | | | | |
| | | M.EcoGDcm, M.EcoNU14Dcm, M.EcoRII, | | | | |
| | | M.Kpn223III, M.Kpn35657II, M.Kpn36Dcm, | | | | |
| | | M.Kpn555I, M.Kpn62629II, M.KpnAATV, | | | | |
| | | M.Kqu603Dcm, M.Psp345I, M.Sen158Dcm, | | | | |
| | | M.Sen641Dcm, M.SenA46Dcm, | | | | |
| | | M.SenAboDcm, M.TcoKWC4II | | | | |
| BpuSI, BslFI, | GGGA | M.AvaIX, M.Cfr10I, M.Nme18VI, M.VchAI, | RCCGGY | 2, 5 | m5C | GGGACCGGYNNNNNN[NNNN] |
| BsmFI, | C | M.Vch0395I | | | | |
| BspLU11III, | | | | | | |
| BstOZ616I, FaqI | | | | | | |
| BpuSI, BsIFI, | GGGA | M.BanLII, M.CpeAII, M.SinI | GGWCC | 2, 4 | m5C | GGGACCNNNNNNNNN[NNNN] |
| BsmFI, | C | | | | | |
| BspLU11III, | | | | | | |
| BstOZ616I, FaqI | | | | | | |
| BpuSI, BsIFI, | GGGA | M.BceSII | GGWCC | 1, 5 | m5C | GGGACCNNNNNNNNN[NNNN] |
| BsmFI, | C | | | | | |
| BspLU11III, | | | | | | |
| BstOZ616I, FaqI | | | | | | |
| BpuSI, BsIFI, | GGGA | M.BcoSlacII, M.MspLW5III, M.Nbr128I, | CTCGAG | 1, 6 | m4C | CTCGAGGGACNNNNNNNNNN[NNNN], |
| BsmFI, | C | M.Psy18884II, M.Tam77409II, M.TbrGE1II, | | | | GGGACTCGAGNNNNN[NNNN] |
| BspLU11III, | | M.TpaRLII | | | | |
| BstOZ616I, FaqI | | | | | | |
| BpuSI, BslFI, | GGGA | M.BepI, M.FpsJV, M.Gel16401III, M.Pdi8503I | CGCG | 1, 4 | m5C | CGCGGGACNNNNNNNNNN[NNNN], |
| BsmFI, | C | | | | | GGGACGCGNNNNNNN[NNNN] |
| BspLU11III, | | | | | | |
| BstOZ616I, FaqI | | | | | | |
| BpuSI, BsIFI, | GGGA | M.Bhy27164IV, M.BstNI, M.EcoDHB4Dcm, | CCWGG | 2, 4 | m4C | CCWGGGACNNNNNNNNNN[NNNN] |
| BsmFI, | C | M.EcoK54Dcm, M.Gth3570I, M.Hla49239I, | | | | |
| BspLU11III, | | M.MvaI, M.Pdi8503II, M.Sso30807Dcm, | | | | |
| BstOZ616I, FaqI | | M.YpeI, M.Ype41I, M.YpeShI | | | | |
| BpuSI, BsIFI, | GGGA | M.BsoBI | CYCGRG | 1, 6 | m4C | CYCGRGGGACNNNNNNNNNN[NNNN], |
| BsmFI, | C | | | | | CYCGGGGACNNNNNNNNNN[NNNN], |
| BspLU11III, | | | | | | CYCGGGACNNNNNNNNNN[NNNN], |
| BstOZ616I, FaqI | | | | | | GGGACYCGRGNNNNN[NNNN] |
| BpuSI, BslFI, | GGGA | M.BsuFI, M.CpeAIV, M.MspI | CCGG | 1, 4 | m5C | CCGGGGACNNNNNNNNNN[NNNN], |
| BsmFI, | C | | | | | CCGGGACNNNNNNNNNN[NNNN], |
| BspLU11III, | | | | | | GGGACCGGNNNNNNN[NNNN] |
| BstOZ616I, FaqI | | | | | | |
| BpuSI, BslFI, | GGGA | M.Cab13497I, M.Dac11109III, M.Dco13527I, | CTAG | 1, 4 | m4C | CTAGGGACNNNNNNNNNN[NNNN], |
| BsmFI, | C | M.Djo10085I, M.Hbo11551I, M.Hka19301III, | | | | GGGACTAGNNNNNNN[NNNN] |
| BspLU11III, | | M.Hme33500I, M.HsaR1I, M.Hsi33800I, | | | | |
| BstOZ616I, FaqI | | M.HspKM1WII, M.HspNII, M.HtuI, M.HvoDSI, | | | | |
| | | M.Lba2029II, M.Mbo45II, M.MjaI, M.MthZI, | | | | |
| | | M.Nas12278I, M.Rfl3010I, M.SsmMI | | | | |
| BpuSI, BsIFI, | GGGA | M.CagVIII | ACGCGT | 2, 5 | m4C | GGGACGCGTNNNNNN[NNNN] |
| BsmFI, | C | | | | | |
| BspLU11III, | | | | | | |
| BstOZ616I, FaqI | | | | | | |
| BpuSI, BsIFI, | GGGA | M.Cdi630III | CCSSGG | 2, 5 | m4C | CCSSGGGACNNNNNNNNNN[NNNN], |
| BsmFI, | C | | | | | CCSGGGACNNNNNNNNNN[NNNN] |
| BspLU11III, | | | | | | |
| BstOZ616I, FaqI | | | | | | |
| BpuSI, BsIFI, | GGGA | M.Cfr9I, M.SmaI, M.Sma36365II, M.Xca85III, | CCCGGG | 2, 5 | m4C | CCCGGGGACNNNNNNNNNN[NNNN], |
| BsmFI, | C | M.XcyI, M.XmaI, M.XveII | | | | CCCGGGACNNNNNNNNNN[NNNN] |
| BspLU11III, | | | | | | |
| BstOZ616I, FaqI | | | | | | |
| BpuSI, BslFI, | GGGA | M.CfrBI, M.Sen1735IV, M.SenAnaIV | CCWWGG | 1, 6 | m4C | CCWWGGGGACNNNNNNNNNN[NNNN], |
| BsmFI, | C | | | | | CCWWGGGACNNNNNNNNNN[NNNN], |
| BspLU11III, | | | | | | GGGACCWWGGNNNNN[NNNN] |
| BstOZ616I, FaqI | | | | | | |
| BpuSI, BslFI, | GGGA | M.Cmu51329I, M.EcoJA03PDcm, | CCWGG | 1, 5 | Unknown | CCWGGGGACNNNNNNNNNN[NNNN], |
| BsmFI, | C | M.RorR1Dcm, M.Sen8391 Dcm, M.ZalSM2II | | | | CCWGGGACNNNNNNNNNN[NNNN], |
| BspLU11III, | | | | | | GGGACCWGGNNNNNN[NNNN] |
| BstOZ616I, FaqI | | | | | | |
| BpuSI, BslFI, | GGGA | M.CocIII, M.Fsi4947II, M.TdeIII, | GGNCC | 1, 5 | m4C | GGGACCNNNNNNNNN[NNNN] |
| BsmFI, | C | M.Tph12270I | | | | |
| BspLU11III, | | | | | | |
| BstOZ616I, FaqI | | | | | | |
| BpuSI, BsIFI, | GGGA | M.Cpa18696III, M.Ype19I, M.YpeDodI, | CCWGG | 2, 4 | Unknown | CCWGGGACNNNNNNNNNN[NNNN] |
| BsmFI, | C | M.YpeEDI, M.YpeJ9I, M.YpePGI | | | | |
| BspLU11III, | | | | | | |
| BstOZ616I, FaqI | | | | | | |
| BpuSI, BsIFI, | GGGA | M.DdeI | CTNAG | 1, 5 | m5C | CTNAGGGACNNNNNNNNNN[NNNN], |
| BsmFI, | C | | | | | GGGACTNAGNNNNNN[NNNN] |
| BspLU11III, | | | | | | |
| BstOZ616I, FaqI | | | | | | |
| BpuSI, BsIFI, | GGGA | M.DsaV, M.Ecl18kI, M.FpsJVI, M.NlaX, | CCNGG | 2, 4 | m5C | CCNGGGACNNNNNNNNNN[NNNN], |
| BsmFI, | C | M.SenPI, M.SsoII | | | | CCGGGACNNNNNNNNNN[NNNN] |
| BspLU11III, | | | | | | |
| BstOZ616I, FaqI | | | | | | |
| BpuSI, BslFI, | GGGA | M.Eco29kI, M.NgoAIII, M.SacII | CCGCGG | 2, 5 | m5C | CCGCGGGACNNNNNNNNNN[NNNN] |
| BsmFI, | C | | | | | |
| BspLU11III, | | | | | | |
| BstOZ616I, FaqI | | | | | | |
| BpuSI, BsIFI, | GGGA | M.EcoNI | CCTNNNN | 2, 10 | m4C | CCTNNNNNAGGGACNNNNNNNNNN[NNNN] |
| BsmFI, | C | | NAGG | | | |
| BspLU11III, | | | | | | |
| BstOZ616I, FaqI | | | | | | |
| BpuSI, BsIFI, | GGGA | M.EcoO109I | RGGNCCY | 3, 5 | m5C | GGGACCYNNNNNNNN[NNNN] |
| BsmFI, | C | | | | | |
| BspLU11III, | | | | | | |
| BstOZ616I, FaqI | | | | | | |
| BpuSI, BslFI, | GGGA | M.EfaRFII, M.Mae7806II | CCGG | 2, 3 | m4C | CCGGGACNNNNNNNNNN[NNNN] |
| BsmFI, | C | | | | | |
| BspLU11III, | | | | | | |
| BstOZ616I, FaqI | | | | | | |
| BpuSI, BslFI, | GGGA | M.FatI | CATG | 1, 4 | m5C | CATGGGACNNNNNNNNNN[NNNN], |
| BsmFI, | C | | | | | GGGACATGNNNNNNN[NNNN] |
| BspLU11III, | | | | | | |
| BstOZ616I, FaqI | | | | | | |
| BpuSI, BsIFI, | GGGA | M.FisAW1I, M.ThaI, M.Tph12270II | CGCG | 1, 4 | m4C | CGCGGGACNNNNNNNNNN[NNNN], |
| BsmFI, | C | | | | | GGGACGCGNNNNNNN[NNNN] |
| BspLU11III, | | | | | | |
| BstOZ616I, FaqI | | | | | | |
| BpuSI, BslFI, | GGGA | M.FnoB1II, M.Hal24586I, M.Hpy298V, | CCGG | 1, 4 | m4C | CCGGGGACNNNNNNNNNN[NNNN], |
| BsmFI, | C | M.Hpy299IX, M.Hpy30V, M.Hpy32XI, | | | | CCGGGACNNNNNNNNNN[NNNN], |
| BspLU11III, | | M.Hpy57V, M.Hpy66IX, M.Hpy99VIII, | | | | GGGACCGGNNNNNNN[NNNN] |
| BstOZ616I, FaqI | | M.HpyFV, M.HpyUM032IX, M.HpyUM037IX, | | | | |
| | | M.MjaVI, M.PspJDRI, M.TmeBII | | | | |
| BpuSI, BsIFI, | GGGA | M.FpsJI, M.HpaII, M.Nme18II, M.NmeAI | CCGG | 2, 3 | m5C | CCGGGACNNNNNNNNNN[NNNN] |
| BsmFI, | C | | | | | |
| BspLU11III, | | | | | | |
| BstOZ616I, FaqI | | | | | | |
| BpuSI, BslFI, | GGGA | M.Gel16401IV | CTGG | 3 | m5C | CTGGGACNNNNNNNNNN[NNNN] |
| BsmFI, | C | | | | | |
| BspLU11III, | | | | | | |
| BstOZ616I, FaqI | | | | | | |
| BpuSI, BsIFI, | GGGA | M.GsuRed1IV, M.Osp807II, M.Tth111I | GACNNNG | 2, 8 | m6A | GGGACNNNGTCNNNN[NNNN] |
| BsmFI, | C | | TC | | | |
| BspLU11III, | | | | | | |
| BstOZ616I, FaqI | | | | | | |
| BpuSI, BslFI, | GGGA | M.Hpy298II, M.Hpy299II, M.Hpy66II, | ACNGT | 2, 4 | m4C | GGGACNGTNNNNNNN[NNNN] |
| BsmFI, | C | M.HpyUM032II, M.HpyUM037II | | | | |
| BspLU11III, | | | | | | |
| BstOZ616I, FaqI | | | | | | |
| BpuSI, BslFI, | GGGA | M.Hpy30VIII, M.Hpy32VIII, M.Hpy57III, | TCNNGA | 1, 6 | m6A | TCGGGACNNNNNNNNNN[NNNN] |
| BsmFI, | C | M.Hpy66VI, M.Hpy99XVIII, M.HpyFVIII, | | | | |
| BspLU11III, | | M.HpyPVIII | | | | |
| BstOZ616I, FaqI | | | | | | |
| BpuSI, BslFI, | GGGA | M.Hpy30X, M.Hpy57VIII, M.HpyFXI, M.MhuI | CTNAG | 1, 5 | m4C | CTNAGGGACNNNNNNNNNN[NNNN], |
| BsmFI, | C | | | | | GGGACTNAGNNNNNN[NNNN] |
| BspLU11III, | | | | | | |
| BstOZ616I, FaqI | | | | | | |
| BpuSI, BsIFI, | GGGA | M.Hpy99IV, M.HpyFORFX | CCNNGG | 1, 6 | m4C | CCNNGGGGACNNNNNNNNNN[NNNN], |
| BsmFI, | C | | | | | CCNNGGGACNNNNNNNNNN[NNNN], |
| BspLU11III, | | | | | | CCNGGGACNNNNNNNNNN[NNNN], |
| BstOZ616I, FaqI | | | | | | GGGACCNNGGNNNNN[NNNN] |
| BpuSI, BsIFI, | GGGA | M.Hpy99XI | ACGT | 2, 3 | m5C | GGGACGTNNNNNNNN[NNNN] |
| BsmFI, | C | | | | | |
| BspLU11III, | | | | | | |
| BstOZ616I, FaqI | | | | | | |
| BpuSI, BsIFI, | GGGA | M.HpyAV, M.Nme18IV | GAAGG | 3, 4 | m6A, | GAAGGGACNNNNNNNNNN[NNNN] |
| BsmFI, | C | | | | m5C | |
| BspLU11III, | | | | | | |
| BstOZ616I, FaqI | | | | | | |
| BpuSI, BsIFI, | GGGA | M.Hpy D27I | GAGG | 2, 4 | m6A, | GGGACCTCNNNNNNN[NNNN], |
| BsmFI, | C | | | | m5C | GAGGGGACNNNNNNNNNN[NNNN], |
| BspLU11III, | | | | | | GAGGGACNNNNNNNNNN[NNNN] |
| BstOZ616I, FaqI | | | | | | |
| BpuSI, BsIFI, | GGGA | M.Mae7806III, M.PspPI, M.Sau96I | GGNCC | 2, 4 | m5C | GGGACCNNNNNNNNN[NNNN] |
| BsmFI | C | | | | | |
| BspLU11III, | | | | | | |
| BstOZ616I, FaqI | | | | | | |
| BpuSI, BslFI, | GGGA | M.MjaII | GGNCC | 1, 5 | m5C | GGGACCNNNNNNNNN[NNNN] |
| BsmFI, | C | | | | | |
| BspLU11III, | | | | | | |
| BstOZ616I, FaqI | | | | | | |
| BpuSI, BsIFI, | GGGA | M.MlyI, M.Pen113I | GASTC | 2, 4 | m6A | GGGACTCNNNNNNNN[NNNN] |
| BsmFI, | C | | | | | |
| BspLU11III, | | | | | | |
| BstOZ616I, FaqI | | | | | | |
| BpuSI, BslFI, | GGGA | M.Msp1II | CCAGG | 5 | m4C | GGGACCTGGNNNNNN[NNNN], |
| BsmFI, | C | | | | | CCAGGGGACNNNNNNNNNN[NNNN], |
| BspLU11III, | | | | | | CCAGGGACNNNNNNNNNN[NNNN] |
| BstOZ616I, FaqI | | | | | | |
| BpuSI, BslFI, | GGGA | M.Msp42II | CCWGG | 1, 5 | m4C | CCWGGGGACNNNNNNNNNN[NNNN], |
| BsmFI, | C | | | | | CCWGGGACNNNNNNNNNN[NNNN], |
| BspLU11III, | | | | | | GGGACCWGGNNNNNN[NNNN] |
| BstOZ616I, FaqI | | | | | | |
| BpuSI, BsIFI, | GGGA | M.NgoAXV, M.NgoMV | GGNNCC | 2, 5 | m5C | GGGACCNNNNNNNNN[NNNN] |
| BsmFI, | C | | | | | |
| BspLU11III, | | | | | | |
| BstOZ616I, FaqI | | | | | | |
| BpuSI, BsIFI, | GGGA | M.Nme18III | TCTGG | 2, 4 | m5C | TCTGGGACNNNNNNNNNN[NNNN] |
| BsmFI, | C | | | | | |
| BspLU11III, | | | | | | |
| BstOZ616I, FaqI | | | | | | |
| BpuSI, BslFI, | GGGA | M.NmeDI | VCCGGY | 2, 5 | m5C | RCCGGGGACNNNNNNNNNN[NNNN], |
| BsmFI, | C | | | | | GGGACCGGBNNNNNN[NNNN], |
| BspLU11III, | | | | | | RCCGGGACNNNNNNNNNN[NNNN] |
| BstOZ616I, FaqI | | | | | | |
| BpuSI, BslFI, | GGGA | M.NmeMC58III | CCAGA | 1 | m5C | TCTGGGGACNNNNNNNNNN[NNNN], |
| BsmFI, | C | | | | | TCTGGGACNNNNNNNNNN[NNNN], |
| BspLU11III, | | | | | | GGGACCAGANNNNNN[NNNN] |
| BstOZ616I, FaqI | | | | | | |
| BpuSI, BsIFI, | GGGA | M.Nsp209III, M.Nsp51109II | CTCGAG | 1, 6 | m5C | CTCGAGGGACNNNNNNNNNN[NNNN], |
| BsmFI, | C | | | | | GGGACTCGAGNNNNN[NNNN] |
| BspLU11III, | | | | | | |
| BstOZ616I, FaqI | | | | | | |
| BpuSI, BslFI, | GGGA | M.NspI, M.NspHI | RCATGY | 2, 5 | m5C | GGGACATGYNNNNNN[NNNN] |
| BsmFI, | C | | | | | |
| BspLU11III, | | | | | | |
| BstOZ616I, FaqI | | | | | | |
| BpuSI, Bs1FI, | GGGA | M.Pam7686I | CCATGG | 1, 6 | m5C | CCATGGGGACNNNNNNNNNN[NNNN], |
| BsmFI, | C | | | | | CCATGGGACNNNNNNNNNN[NNNN], |
| BspLU11III, | | | | | | GGGACCATGGNNNNN[NNNN] |
| BstOZ616I, FaqI | | | | | | |
| BpuSI, BslFI, | GGGA | M.Pfa23572II | CGATCG | 1, 6 | m5C | CGATCGGGACNNNNNNNNNN[NNNN], |
| BsmFI, | C | | | | | GGGACGATCGNNNNN[NNNN] |
| BspLU11III, | | | | | | |
| BstOZ616I, FaqI | | | | | | |
| BpuSI, BslFI, | GGGA | M.Pla5I | CTAG | 1, 4 | Unknown | CTAGGGACNNNNNNNNNN[NNNN], |
| BsmFI, | C | | | | | GGGACTAGNNNNNNN[NNNN] |
| BspLU11III, | | | | | | |
| BstOZ616I, FaqI | | | | | | |
| BpuSI, BslFI, | GGGA | M.Sam53668II | CCATGG | 1, 6 | Unknown | CCATGGGGACNNNNNNNNNN[NNNN], |
| BsmFI, | C | | | | | CCATGGGACNNNNNNNNNN[NNNN], |
| BspLU11III, | | | | | | GGGACCATGGNNNNN[NNNN] |
| BstOZ616I, FaqI | | | | | | |
| BpuSI, BsIFI, | GGGA | M.Sen1781III | CCWWGG | 1, 6 | Unknown | CCWWGGGGACNNNNNNNNNN[NNNN], |
| BsmFI, | C | | | | | CCWWGGGACNNNNNNNNNN[NNNN], |
| BspLU11III, | | | | | | GGGACCWWGGNNNNN[NNNN] |
| BstOZ616I, FaqI | | | | | | |
| BpuSI, BsIFI, | GGGA | M.SonIII | GACNNNN | 2, 8 | m6A | GGGACNNNNTGCNNN[NNNN] |
| BsmFI, | C | | TGC | | | |
| BspLU11III, | | | | | | |
| BstOZ616I, FaqI | | | | | | |
| BpuSI, BsIFI, | GGGA | M.TdeII | CTCTTC | 1, 2 | m4C | GAAGAGGGACNNNNNNNNNN[NNNN], |
| BsmFI, | C | | | | m6A | GGGACTCTTCNNNNN[NNNN] |
| BspLU11III, | | | | | | |
| BstOZ616I, FaqI | | | | | | |
| BpuSI, BsIFI, | GGGA | M.TspRI | CASTG | 1, 5 | m5C | CASTGGGACNNNNNNNNNN[NNNN], |
| BsmFI, | C | | | | | GGGACASTGNNNNNN[NNNN] |
| BspLU11III, | | | | | | |
| BstOZ616I, FaqI | | | | | | |
| BpuSI, BslFI, | GGGA | M1.AgoG2I, M2.AgoG2I | CCAGT | 1, 4 | m4C | ACTGGGGACNNNNNNNNNN[NNNN], |
| BsmFI, | C | | | | | ACTGGGACNNNNNNNNNN[NNNN], |
| BspLU11III, | | | | | | GGGACTGGNNNNNNN[NNNN], |
| BstOZ616I, FaqI | | | | | | GGGACCAGTNNNNNN[NNNN] |
| BpuSI, BsIFI, | GGGA | M1.Bag18758II, M2.Bag18758II | CACGGG | 3, 5 | Unknown | CACGGGGACNNNNNNNNNN[NNNN], |
| BsmFI, | C | | | | | CACGGGACNNNNNNNNNN[NNNN] |
| BspLU11III, | | | | | | |
| BstOZ616I, FaqI | | | | | | |
| BpuSI, BsIFI, | GGGA | M1.BceSIII | ACGGC | 2 | m4C | GGGACGGCNNNNNNN[NNNN] |
| BsmFI, | C | | | | | |
| BspLU11III, | | | | | | |
| BstOZ616I, FaqI | | | | | | |
| BpuSI, BsIFI, | GGGA | M1.BcnI, M2.BcnI, M.NciI | CCSGG | 2, 4 | m4C | CCSGGGACNNNNNNNNNN[NNNN], |
| BsmFI, | C | | | | | CCGGGACNNNNNNNNNN[NNNN] |
| BspLU11III, | | | | | | |
| BstOZ616I, FaqI | | | | | | |
| BpuSI, BsIFI, | GGGA | M1.BfiI | ACTGGG | 5 | m4C | ACTGGGGACNNNNNNNNNN[NNNN], |
| BsmFI | C | | | | | ACTGGGACNNNNNNNNNN[NNNN] |
| BspLU11III, | | | | | | |
| BstOZ616I, FaqI | | | | | | |
| BpuSI, BsIFI, | GGGA | M1.BspACI | CCGC | 1 | m5C | GCGGGGACNNNNNNNNNN[NNNN], |
| BsmFI, | C | | | | | GCGGGACNNNNNNNNNN[NNNN], |
| BspLU11III, | | | | | | GGGACCGCNNNNNNN[NNNN] |
| BstOZ616I, FaqI | | | | | | |
| BpuSI, | GGGA | M1.Dsh12II, M2.Dsh12II | GACGGC | 3, 4 | m4C | GGGACGGCNNNNNNN[NNNN] |
| BsIFI, | C | | | | | |
| BsmFI, | | | | | | |
| BspLU11III, | | | | | | |
| BstOZ616I, FaqI | | | | | | |
| BpuSI, BsIFI, | GGGA | M1.Hpy32II | GRRGA | 5 | m6A | GGGGACNNNNNNNNNN[NNNN] |
| BsmFI, | C | | | | | |
| BspLU11III, | | | | | | |
| BstOZ616I, FaqI | | | | | | |
| BpuSI, BslFI, | GGGA | M1.LplAG30I | GAAGG | 5 | m5C | GGGACCTTCNNNNNN[NNNN], |
| BsmFI, | C | | | | | GAAGGGGACNNNNNNNNNN[NNNN], |
| BspLU11III, | | | | | | GAAGGGACNNNNNNNNNN[NNNN] |
| BstOZ616I, FaqI | | | | | | |
| BpuSI, BslFI, | GGGA | M2.BceSIII, M1.Pru9I, M2.Pru9I | ACGGC | 2, 4 | m4C | GGGACGGCNNNNNNN[NNNN] |
| BsmFI, | C | | | | | |
| BspLU11III, | | | | | | |
| BstOZ616I, FaqI | | | | | | |
| BpuSI, BsIFI, | GGGA | M2.BfiI | ACTGGG | 2 | m4C | GGGACTGGGNNNNNN[NNNN] |
| BsmFI, | C | | | | | |
| BspLU11III, | | | | | | |
| BstOZ616I, FaqI | | | | | | |
| BpuSI, BslFI, | GGGA | M2.BfuAI | ACCTGC | 2 | m5C | GGGACCTGCNNNNNN[NNNN] |
| BsmFI, | C | | | | | |
| BspLU11III, | | | | | | |
| BstOZ616I, FaqI | | | | | | |
| BpuSI, BslFI, | GGGA | M2.HgaI, M1.LlaJI | GACGC | 3 | m5C | GGGACGCNNNNNNNN[NNNN] |
| BsmFI, | C | | | | | |
| BspLU11III, | | | | | | |
| BstOZ616I, FaqI | | | | | | |
| BpuSI, BslFI, | GGGA | M2.HpyAVI, M1.MnlI | GAGG | 4 | m5C | GGGACCTCNNNNNNN[NNNN], |
| BsmFI, | C | | | | | GAGGGGACNNNNNNNNNN[NNNN], |
| BspLU11III, | | | | | | GAGGGACNNNNNNNNNN[NNNN] |
| BstOZ616I, FaqI | | | | | | |
| BpuSI, BslFI, | GGGA | M2.Nme579IV, M2.NmeMC58II | GACGC | 2 | m6A | GGGACGCNNNNNNNN[NNNN] |
| BsmFI, | C | | | | | |
| BspLU11III, | | | | | | |
| BstOZ616I, FaqI | | | | | | |
| CseI, HgaI | GACG | M.AbaBs12I, M.Awo1030I, M.Cdu23823I, | CCWGG | 1, 5 | m5C | CCWGGACGCNNNNN[NNNNN], |
| | C | M.Csa8155II, M.Cun9529I, M.EasL1Dcm, | | | | GACGCCWGGN[NNNNN] |
| | | M.Eba57Dcm, M.Ec134399Dcm, | | | | |
| | | M.Eco12761Dcm, M.Eco3609Dcm, | | | | |
| | | M.Eco4255Dcm, M.EcoVR50Dcm, | | | | |
| | | M.EsaSP1II, M.Kpn34618Dcm, | | | | |
| | | M.Kpn38547Dcm, M.Kpn39I, M.Kpn43816I, | | | | |
| | | M.Kpn677ORFDcm, M.Kpn928Dcm, | | | | |
| | | M.KpnNIH1Dcm, M.KpnNIH10Dcm, | | | | |
| | | M.KpnNIH30Dcm, M.Kva120Dcm, M.Lsp48I, | | | | |
| | | M.Pmi1I, M.SpaD2III, M.SplRp8II, | | | | |
| | | M.SptADcm, M.Tsu2489III | | | | |
| CseI, HgaI | GACG | M.AccI, M.FpsFPG3II, M.SdeAIV | GTMKAC | 2, 5 | m6A | GTMGACGCNNNNN[NNNNN] |
| | C | | | | | |
| CseI, HgaI | GACG | M.AciI | CCGC | 1, 3 | m5C | GCGGACGCNNNNN[NNNNN], |
| | C | | | | | GACGCGGNNN[NNNNN], |
| | | | | | | GACGCCGCNN[NNNNN] |
| CseI, HgaI | GACG | M.AflIII | ACRYGT | 2, 5 | m4C | GACGCGTNNN[NNNNN] |
| | C | | | | | |
| CseI, HgaI | GACG | M.Alw26I | GAGAC | 4, 3 | m6A, | GAGACGCNNNNN[NNNNN] |
| | C | | | | m5C | |
| CseI, HgaI | GACG | M.Ama55I, M.CnaPQ2III, M.Rmo1926II, | CGGCCG | 1, 6 | m5C | CGGCCGACGCNNNNN[NNNNN], |
| | C | M.SenC1765IV, M.SspG1I, M.XorPXII | | | | GACGCGGCCG[NNNNN] |
| CseI, HgaI | GACG | M.AorT14III, M.GsuRed1III, M.SalI | GTCGAC | 2, 5 | m6A | GTCGACGCNNNNN[NNNNN] |
| | C | | | | | |
| CseI, HgaI | GACG | M.AquI | CYCGRG | 1, 6 | m5C | CYCGRGACGCNNNNN[NNNNN], |
| | C | | | | | GACGCYCGRG[NNNNN] |
| CseI, HgaI | GACG | M.AvaIX, M.Cfr10I, M.Nme18VI, M.VchAI, | RCCGGY | 2, 5 | m5C | GACGCCGGYN[NNNNN] |
| | C | M.Vch0395I | | | | |
| CseI, HgaI | GACG | M.BamWS8I, M.CthV, M.EfaRFI, M.Saf8902II, | GCWGC | 2, 4 | m5C | GACGCWGCNN[NNNNN] |
| | C | M.TacII, M.TcoKWC4III | | | | |
| CseI, HgaI | GACG | M.BbvI, M.BceSIV | GCAGC | 2, 4 | m5C | GACGCTGCNN[NNNNN], |
| | C | | | | | GACGCAGCNN[NNNNN] |
| CseI, HgaI | GACG | M.BcoSlacII, M.MspLW5III, M.Nbr128I, | CTCGAG | 1, 6 | m4C | CTCGAGACGCNNNNN[NNNNN], |
| | C | M.Psy18884II, M.Tam77409II, M.TbrGE1II, | | | | GACGCTCGAG[NNNNN] |
| | | M.TpaRLII | | | | |
| CseI, HgaI | GACG | M.BepI, M.FpsJV, M.Gel16401III, M.Pdi8503I | CGCG | 1, 4 | m5C | GACGCGNNNN[NNNNN], |
| | C | | | | | CGCGACGCNNNNN[NNNNN] |
| CseI, HgaI | GACG | M.BsoBI | CYCGRG | 1, 6 | m4C | CYCGRGACGCNNNNN[NNNNN], |
| | C | | | | | GACGCYCGRG[NNNNN] |
| CseI, HgaI | GACG | M.BsuFI, M.CpeAIV, M.MspI | CCGG | 1, 4 | m5C | CCGGACGCNNNNN[NNNNN], |
| | C | | | | | GACGCCGGNN[NNNNN] |
| CseI, HgaI | GACG | M.Cab13497I, M.Dac11109III, M.Dco13527I, | CTAG | 1, 4 | m4C | CTAGACGCNNNNN[NNNNN], |
| | C | M.Djo10085I, M.Hbo11551I, M.Hka19301III, | | | | GACGCTAGNN[NNNNN] |
| | | M.Hme33500I, M.HsaR1I, M.Hsi33800I, | | | | |
| | | M.HspKM1WII, M.HspNII, M.HtuI, M.HvoDSI, | | | | |
| | | M.Lba2029II, M.Mbo45II, M.MjaI, M.MthZI, | | | | |
| | | M.Nas12278I, M.Rfl3010I, M.SsmMI | | | | |
| CseI, HgaI | GACG | M.Cac8I | GCNNGC | 2, 5 | m5C | GACGCNNGCN[NNNNN] |
| | C | | | | | |
| CseI, HgaI | GACG | M.CagVI | TCCGGA | 1, 6 | m6A | TCCGGACGCNNNNN[NNNNN] |
| | C | | | | | |
| CseI, HgaI | GACG | M.CagVIII | ACGCGT | 2, 5 | m4C | GACGCGTNNN[NNNNN] |
| | C | | | | | |
| CseI, HgaI | GACG | M.CcrNAV | YGCCGGCR | 3, 6 | m5C | GACGCCGGCR[NNNNN] |
| | C | | | | | |
| CseI, HgaI | GACG | M.Cdi630IV, M.Ckr177III, M.CmaLM2II, | GCNGC | 2, 4 | m5C | GACGCNGCNN[NNNNN] |
| | C | M.CocII, M.Fnu4HI, M.Fsp 4HI | | | | |
| CseI, HgaI | GACG | M.CfrBI, M.Sen1735IV, M.SenAnaIV | CCWWGG | 1, 6 | m4C | CCWWGGACGCNNNNN[NNNNN], |
| | C | | | | | GACGCCWWGG[NNNNN] |
| CseI, HgaI | GACG | M.Cmu51329I, M.EcoJA03PDcm, | CCWGG | 1, 5 | Unknown | CCWGGACGCNNNNN[NNNNN], |
| | C | M.RorR1Dcm, M.Sen8391Dcm, M.ZalSM2II | | | | GACGCCWGGN[NNNNN] |
| CseI, HgaI | GACG | M.CocI, M.Fli6794II, M.HincII, M.HindII, | GTYRAC | 2, 5 | m6A | GTYGACGCNNNNN[NNNNN] |
| | C | M.HinHia1II | | | | |
| CseI, HgaI | GACG | M.CsiFSMII, M.MfoCT6IV, M.NgoAIV, | GCCGGC | 2, 5 | m5C | GACGCCGGCN[NNNNN] |
| | C | M.NgoMIV, M1.Sgr13350II | | | | |
| CseI, HgaI | GACG | M.CviJI | VGCY | 2, 3 | m5C | GACGCYNNNN[NNNNN] |
| | C | | | | | |
| CseI, HgaI | GACG | M.CviQIII, M.CviSIII, M.Hpy299XI, | TCGA | 1, 4 | m6A | TCGACGCNNNNN[NNNNN] |
| | C | M.Hpy30II, M.Hpy32X, M.Hpy99VII, | | | | |
| | | M.HpyAX, M.HpyFII, M.HpyUM032XVII, | | | | |
| | | M.Tam77409III, M.TaqI, M.TpaRLI, | | | | |
| | | M.TthHB8I | | | | |
| CseI, HgaI | GACG | M.DdeI | CTNAG | 1, 5 | m5C | CTNAGACGCNNNNN[NNNNN], |
| | C | | | | | GACGCTNAGN[NNNNN] |
| CseI, HgaI | GACG | M.Esp3I | GAGACG | 4, 3 | m6A, | GAGACGCNNNNN[NNNNN] |
| | C | | | | m5C | |
| CseI, HgaI | GACG | M.FatI | CATG | 1, 4 | m5C | CATGACGCNNNNN[NNNNN], |
| | C | | | | | GACGCATGNN[NNNNN] |
| CseI, HgaI | GACG | M.FisAW1I, M.ThaI, M.Tph12270II | CGCG | 1, 4 | m4C | GACGCGNNNN[NNNNN], |
| | C | | | | | CGCGACGCNNNNN[NNNNN] |
| CseI, HgaI | GACG | M.FnoB1II, M.Hal24586I, M.Hpy298V, | CCGG | 1, 4 | m4C | CCGGACGCNNNNN[NNNNN], |
| | C | M.Hpy299IX, M.Hpy30V, M.Hpy32XI, | | | | GACGCCGGNN[NNNNN] |
| | | M.Hpy57V, M.Hpy66IX, M.Hpy99VIII, | | | | |
| | | M.HpyFV, M.HpyUM032IX, M.HpyUM037IX, | | | | |
| | | M.MjaVI, M.PspJDRI, M.TmeBII | | | | |
| CseI, HgaI | GACG | M.GsuRed1IV, M.Osp807II, M.Tth111I | GACNNNG | 2, 8 | m6A | GACGCNGTCN[NNNNN] |
| | C | | TC | | | |
| CseI, HgaI | GACG | M.HhaI, M.HinP1I, M.Hpy99III, M.HpyAVIII, | GCGC | 2, 3 | m5C | GACGCGCNNN[NNNNN] |
| | C | M.HpyUM032XV | | | | |
| CseI, HgaI | GACG | M.Hka19301IV | TCGCGA | 2, 5 | m4C | TCGCGACGCNNNNN[NNNNN] |
| | C | | | | | |
| CseI, HgaI | GACG | M.Hme33500II | HGCWGCK | 3 | m4C | GACGCWGCKN[NNNNN] |
| | C | | | | | |
| CseI, HgaI | GACG | M.Hpy188I, M.Hpy298IX, M.Hpy299V, | TCNGA | 1, 5 | m6A | TCNGACGCNNNNN[NNNNN] |
| | C | M.Hpy66V, M.HpyUM032V | | | | |
| CseI, HgaI | GACG | M.Hpy30IX, M.Hpy32IX, M.Hpy57IX, | GTNNAC | 2, 5 | m6A | GTNGACGCNNNNN[NNNNN] |
| | C | M.Hpy66XIII, M.Hpy8I, M.HpyFIX, | | | | |
| | | M.HpyUM032XI, M.HpyUM037V, M.MjaIV, | | | | |
| | | M.MspRAC08II | | | | |
| CseI, HgaI | GACG | M.Hpy30VIII, M.Hpy32VIII, M.Hpy57III, | TCNNGA | 1, 6 | m6A | TCNNGACGCNNNNN[NNNNN] |
| | C | M.Hpy66VI, M.Hpy99XVIII, M.HpyFVIII, | | | | |
| | | M.HpyPVIII | | | | |
| CseI, HgaI | GACG | M.Hpy30X, M.Hpy57VIII, M.HpyFXI, M.MhuI | CTNAG | 1, 5 | m4C | CTNAGACGCNNNNN[NNNNN], |
| | C | | | | | GACGCTNAGN[NNNNN] |
| CseI, HgaI | GACG | M.Hpy66I, M.Hpy99I | CGWCG | 2, 4 | m4C | CGACGCNNNNN[NNNNN] |
| | C | | | | | |
| CseI, HgaI | GACG | M.Hpy99II, M.Tsp45I, M.Tsu2489II | GTSAC | 2, 4 | m6A | GTGACGCNNNNN[NNNNN] |
| | C | | | | | |
| CseI, HgaI | GACG | M.Hpy99IV, M.HpyFORFX | CCNNGG | 1, 6 | m4C | CCNNGGACGCNNNNN[NNNNN], |
| | C | | | | | GACGCCNNGG[NNNNN] |
| CseI, HgaI | GACG | M.HpyD27I | GAGG | 2, 4 | m6A, | GACGCCTCNN[NNNNN], |
| | C | | | | m5C | GAGGACGCNNNNN[NNNNN] |
| CseI, HgaI | GACG | M.Lph145I, M.Lph93I | GGWGA | 5 | m6A | GGWGACGCNNNNN[NNNNN] |
| | C | | | | | |
| CseI, HgaI | GACG | M.Msp1II | CCAGG | 5 | m4C | GACGCCTGGN[NNNNN], |
| | C | | | | | CCAGGACGCNNNNN[NNNNN] |
| CseI, HgaI | GACG | M.Msp42II | CCWGG | 1, 5 | m4C | CCWGGACGCNNNNN[NNNNN], |
| | C | | | | | GACGCCWGGN[NNNNN] |
| CseI, HgaI | GACG | M.NheI | GCTAGC | 1, 6 | m4C | GACGCTAGCN[NNNNN] |
| | C | | | | | |
| CseI, HgaI | GACG | M.Nme18III | CCAGA | 2, 4 | m5C | CCAGACGCNNNNN[NNNNN] |
| | C | | | | | |
| CseI, HgaI | GACG | M.Nme18V | GCGCGC | 2, 5 | m5C | GACGCGCGCN[NNNNN] |
| | C | | | | | |
| CseI, HgaI | GACG | M.NmeDI | VCCGGY | 2, 5 | m5C | GACGCCGGBN[NNNNN] |
| | C | | | | | |
| CseI, HgaI | GACG | M.NmeMC58III | CCAGA | 1 | m5C | TCTGGACGCNNNNN[NNNNN], |
| | C | | | | | GACGCCAGAN[NNNNN] |
| CseI, HgaI | GACG | M.Nsp209III, M.Nsp51109II | CTCGAG | 1, 6 | m5C | CTCGAGACGCNNNNN[NNNNN], |
| | C | | | | | GACGCTCGAG[NNNNN] |
| CseI, HgaI | GACG | M.NspI, M.NspHI | RCATGY | 2, 5 | m5C | GACGCATGYN[NNNNN] |
| | C | | | | | |
| CseI, HgaI | GACG | M.Pam7686I | CCATGG | 1, 6 | m5C | CCATGGACGCNNNNN[NNNNN], |
| | C | | | | | GACGCCATGG[NNNNN] |
| CseI, HgaI | GACG | M.Pfa23572II | CGATCG | 1, 6 | m5C | CGATCGACGCNNNNN[NNNNN], |
| | C | | | | | GACGCGATCG[NNNNN] |
| CseI, HgaI | GACG | M.Pla5I | CTAG | 1, 4 | Unknown | CTAGACGCNNNNN[NNNNN], |
| | C | | | | | GACGCTAGNN[NNNNN] |
| CseI, HgaI | GACG | M.Sam53668II | CCATGG | 1, 6 | Unknown | CCATGGACGCNNNNN[NNNNN], |
| | C | | | | | GACGCCATGG[NNNNN] |
| CseI, HgaI | GACG | M.Sen1781III | CCWWGG | 1, 6 | Unknown | CCWWGGACGCNNNNN[NNNNN], |
| | C | | | | | GACGCCWWGG[NNNNN] |
| CseI, HgaI | GACG | M.SmoLVI, M.Spn23FII, M.Spn556I, | TCTAGA | 1, 6 | m6A | TCTAGACGCNNNNN[NNNNN] |
| | C | M.Spn7465I, M.SpnRI, M.XbaI | | | | |
| CseI, HgaI | GACG | M.SonIII | GACNNNN | 2, 8 | m6A | GACGCNNTGC[NNNNN] |
| | C | | TGC | | | |
| CseI, HgaI | GACG | M.TdeII | CTCTTC | 1, 2 | m4C, | GAAGAGACGCNNNNN[NNNNN], |
| | C | | | | m6A | GACGCTCTTC[NNNNN] |
| CseI, HgaI | GACG | M.TspRI | CASTG | 1, 5 | m5C | CASTGACGCNNNNN[NNNNN], |
| | C | | | | | GACGCASTGN[NNNNN] |
| CseI, HgaI | GACG | M.Yen2516I | GCGCGC | 2, 5 | Unknown | GACGCGCGCN[NNNNN] |
| | C | | | | | |
| CseI, HgaI | GACG | M1.AgoG2I, M2.AgoG2I | CCAGT | 1, 4 | m4C | ACTGGACGCNNNNN[NNNNN], |
| | C | | | | | GACGCCAGTN[NNNNN] |
| CseI, HgaI | GACG | M1.BspACI | CCGC | 1 | m5C | GCGGACGCNNNNN[NNNNN], |
| | C | | | | | GACGCCGCNN[NNNNN] |
| CseI, HgaI | GACG | M1.HphI | GGTGA | 4 | m5C | GGTGACGCNNNNN[NNNNN] |
| | C | | | | | |
| CseI, HgaI | GACG | M1.Hpy32II | GRRGA | 5 | m6A | GRRGACGCNNNNN[NNNNN] |
| | C | | | | | |
| CseI, HgaI | GACG | M1.HpyAII, M1.MboII, M1.NcuI | GAAGA | 5 | m6A | GAAGACGCNNNNN[NNNNN] |
| | C | | | | | |
| CseI, HgaI | GACG | M1.LplAG30I | GAAGG | 5 | m5C | GACGCCTTCN[NNNNN], |
| | C | | | | | GAAGGACGCNNNNN[NNNNN] |
| CseI, HgaI | GACG | M1.Sgr13350III, M2.Sgr13350III | GCTCTTC | 2, 3 | m4C, | GACGCTCTTC[NNNNN] |
| | C | | | | m6A | |
| CseI, HgaI | GACG | M2.BceSIII, M1.Pru9I, M2.Pru9I | GCCGT | 2, 4 | m4C | GACGCCGTNN[NNNNN] |
| | C | | | | | |
| CseI, HgaI | GACG | M2.ClaSBI, M1.Fli6794IV, M2.HphI, | GGTGA | 5 | m6A | GGTGACGCNNNNN[NNNNN] |
| | C | M2.Ngo3502II, M1.Ngo6140II, M1.NgoAXVI, | | | | |
| | | M1.NgoBVIII, M1.NgoFA19I, M2.NgoMVIII, | | | | |
| | | M2.PspHUN102I, M1.Ssp10II | | | | |
| CseI, HgaI | GACG | M2.Hpy32II, M2.HpyAII, M2.MboII, M2.NcuI | GAAGA | 4 | m4C | GAAGACGCNNNNN[NNNNN] |
| | C | | | | | |
| CseI, HgaI | GACG | M2.HpyAVI, M1.MnlI | GAGG | 4 | m5C | GACGCCTCNN[NNNNN], |
| | C | | | | | GAGGACGCNNNNN[NNNNN] |
| CseI, HgaI | GACG | M2.RspA76I | GGGAC | 4 | m6A | GGGACGCNNNNN[NNNNN] |
| | C | | | | | |
| FokI | GGAT | M.AbaBs12I, M.Awo1030I, M.Cdu23823I, | CCWGG | 1, 5 | m5C | CCWGGGATGNNNNNNNNN[NNNN], |
| | G | M.Csa8155II, M.Cun9529I, M.EasL1Dcm, | | | | CCWGGATGNNNNNNNNN[NNNN] |
| | | M.Eba57Dcm, M.Ec134399Dcm, | | | | |
| | | M.Eco12761Dcm, M.Eco3609Dcm, | | | | |
| | | M.Eco4255Dcm, M.EcoVR50Dcm, | | | | |
| | | M.EsaSP1II, M.Kpn34618Dcm, | | | | |
| | | M.Kpn38547Dcm, M.Kpn39I, M.Kpn43816I, | | | | |
| | | M.Kpn677ORFDcm, M.Kpn928Dcm, | | | | |
| | | M.KpnNIH1Dcm, M.KpnNIH10Dcm, | | | | |
| | | M.KpnNIH30Dcm, M.Kva120Dcm, M.Lsp48I, | | | | |
| | | M.Pmi1I, M.SpaD2III, M.SplRp8II, | | | | |
| | | M.SptADcm, M.Tsu2489III | | | | |
| FokI | GGAT | M.AciI | GCGG | 2, 4 | m5C | GCGGGATGNNNNNNNNN[NNNN], |
| | G | | | | | GCGGATGNNNNNNNNN[NNNN] |
| FokI | GGAT | M.Ama55I, M.CnaPQ2III, M.Rmo1926II, | CGGCCG | 1, 6 | m5C | CGGCCGGATGNNNNNNNNN[NNNN] |
| | G | M.SenC1765IV, M.SspG1I, M.XorPXII | | | | |
| FokI | GGAT | M.AquI | CYCGRG | 1, 6 | m5C | CYCGRGGATGNNNNNNNNN[NNNN], |
| | G | | | | | CYCGGGATGNNNNNNNNN[NNNN] |
| FokI | GGAT | M.AspU41II, M.BisIII, M.BsuW23II, | CCWGG | 2, 4 | m5C | CCWGGATGNNNNNNNNN[NNNN] |
| | G | M.CnaPQ2II, M.EcoO6Dcm, M.Eco12581Dcm, | | | | |
| | | M.Eco1655Dcm, M.Eco29787Dcm, | | | | |
| | | M.Eco3024Dcm, M.Eco3317Dcm, | | | | |
| | | M.Eco3325Dcm, M.Eco3740Dcm, | | | | |
| | | M.Eco3911Dcm, M.Eco4211Dcm, | | | | |
| | | M.Eco4465Dcm, M.Eco600Dcm, | | | | |
| | | M.Eco644Dcm, M.Eco86Dcm, | | | | |
| | | M.Eco9001Dcm, M.Eco9387Dcm, | | | | |
| | | M.EcoE1140Dcm, M.EcoE455Dcm, | | | | |
| | | M.EcoGDcm, M.EcoNU14Dcm, M.EcoRII, | | | | |
| | | M.Kpn223III, M.Kpn35657II, M.Kpn36Dcm, | | | | |
| | | M.Kpn555I, M.Kpn62629II, M.KpnAATV, | | | | |
| | | M.Kqu603Dcm, M.Psp345I, M.Sen158Dcm, | | | | |
| | | M.Sen641Dcm, M.SenA46Dcm, | | | | |
| | | M.SenAboDcm, M.TcoKWC4II | | | | |
| FokI | GGAT | M.AvaV, M.SliSI | GATC | 1, 4 | m4C | GGATGATCNNNNNN[NNNN] |
| | G | | | | | |
| FokI | GGAT | M.BceSII | GGWCC | 1, 5 | m5C | GGATGGWCCNNNNN[NNNN] |
| | G | | | | | |
| FokI | GGAT | M.BcoSlacII, M.MspLW5III, M.Nbr128I, | CTCGAG | 1, 6 | m4C | CTCGAGGATGNNNNNNNNN[NNNN] |
| | G | M.Psy18884II, M.Tam77409II, M.TbrGE1II, | | | | |
| | | M.TpaRLII | | | | |
| FokI | GGAT | M.BepI, M.FpsJV, M.Gel16401III, M.Pdi8503I | CGCG | 1, 4 | m5C | CGCGGATGNNNNNNNNN[NNNN] |
| | G | | | | | |
| FokI | GGAT | M.BfaSIII, M.Ccl10114I, M.CfrB38I, | ATGCAT | 2, 5 | m6A | GGATGCATNNNNNN[NNNN] |
| | G | M.CfrH1I, M.EcoGVI, M.EcoKII, | | | | |
| | | M.Fnu10562II, M.SbaUIV, M.Sbo12419III, | | | | |
| | | M.Sbo268II, M.Sen10384II, M.Sen10708II, | | | | |
| | | M.Sen1080II, M.Sen1175III, M.Sen13IV, | | | | |
| | | M.Sen13311IV, M.Sen1387II, M.Sen1427III, | | | | |
| | | M.Sen14882III, M.Sen15791III, M.Sen158III, | | | | |
| | | M.Sen16I, M.Sen1655III, M.Sen1676III, | | | | |
| | | M.Sen1677III, M.Sen1728III, M.Sen1735III, | | | | |
| | | M.Sen1736IV, M.Sen1764III, M.Sen1766III, | | | | |
| | | M.Sen1781IV, M.Sen1783III, M.Sen18569II, | | | | |
| | | M.Sen1878III, M.Sen1880III, M.Sen1896III, | | | | |
| | | M.Sen1898III, M.Sen1899III, M.Sen1903III, | | | | |
| | | M.Sen1906III, M.Sen1908III, M.Sen1910III, | | | | |
| | | M.Sen1921III, M.Sen1927II, M.Sen195II, | | | | |
| | | M.Sen2050II, M.Sen2064III, M.Sen2069III, | | | | |
| | | M.Sen22462I, M.Sen255II, M.Sen318III, | | | | |
| | | M.Sen3387III, M.Sen3890III, M.Sen483III, | | | | |
| | | M.Sen624III, M.Sen641III, M.Sen7378II, | | | | |
| | | M.Sen8391III, M.Sen8692III, M.SenA46III, | | | | |
| | | M.SenAbaII, M.SenAboII, M.SenAnaIII, | | | | |
| | | M.SenC1736III, M.SenC1765III, | | | | |
| | | M.SenC1808IV, M.SenC1810III, M.SenJIII, | | | | |
| | | M.SenL1II, M.SenL15III, M.SenN1660II, | | | | |
| | | M.SenSARA26II, M.SenSPBIII, M.SenTFIII | | | | |
| FokI | GGAT | M.Bhy27164IV, M.BstNI, M.EcoDHB4Dcm, | CCWGG | 2, 4 | m4C | CCWGGATGNNNNNNNNN[NNNN] |
| | G | M.EcoK54Dcm, M.Gth3570I, M.Hla49239I, | | | | |
| | | M.MvaI, M.Pdi8503II, M.Sso30807Dcm, | | | | |
| | | M.YpeI, M.Ype41I, M.YpeShI | | | | |
| FokI | GGAT | M.BsoBI | CYCGRG | 1, 6 | m4C | CYCGRGGATGNNNNNNNNN[NNNN], |
| | G | | | | | CYCGGGATGNNNNNNNNN[NNNN] |
| FokI | GGAT | M.Bsp14III, M.Bsp3003I, M.Bsp3004I, | GATC | 1, 4 | m5C | GGATGATCNNNNNN[NNNN] |
| | G | M.CalB3III, M.CpeAIII, M.Esu35585I, | | | | |
| | | M.FpsJIV, M.Lba2031I, M.Lbo2004I, | | | | |
| | | M.LlaKR2I, M.Lmo1042I, M.Lmo7956II, | | | | |
| | | M.Lsp10393II, M.MspI7I, M.Sau3AI, M.Sba3I, | | | | |
| | | M.Sin395I, M.Spn23FI, M.Sth368I | | | | |
| FokI | GGAT | M.BstXI | CCANNNN | 3, 10 | m6A | CCANNNGGATGGNNNNNNNN[NNNN] |
| | G | | NNTGG | | | |
| FokI | GGAT | M.BsuFI, M.CpeAIV, M.MspI | CCGG | 1, 4 | m5C | CCGGGATGNNNNNNNNN[NNNN], |
| | G | | | | | CCGGATGNNNNNNNNN[NNNN] |
| FokI | GGAT | M.Cab13497I, M.Dac11109III, M.Dco13527I, | CTAG | 1, 4 | m4C | CTAGGATGNNNNNNNNN[NNNN] |
| | G | M.Djo10085I, M.Hbo11551I, M.Hka19301III, | | | | |
| | | M.Hme33500I, M.HsaR1I, M.Hsi33800I, | | | | |
| | | M.Hsp KM1WII, M.HspNII, M.HtuI, M.HvoDSI, | | | | |
| | | M.Lba2029II, M.Mbo45II, M.MjaI, M.MthZI, | | | | |
| | | M.Nas12278I, M.Rfl3010I, M.SsmMI | | | | |
| FokI | GGAT | M.CagVI | TCCGGA | 1, 6 | m6A | TCCGGATGNNNNNNNNN[NNNN] |
| | G | | | | | |
| FokI | GGAT | M.Cdi630III | CCSSGG | 2, 5 | m4C | CCSSGGATGNNNNNNNNN[NNNN] |
| | G | | | | | |
| FokI | GGAT | M.Cfr9I, M.SmaI, M.Sma36365II, M.Xca85III, | CCCGGG | 2, 5 | m4C | CCCGGGATGNNNNNNNNN[NNNN] |
| | G | M.XcyI, M.XmaI, M.XveII | | | | |
| FokI | GGAT | M.CfrBI, M.Sen1735IV, M.SenAnaIV | CCWWGG | 1, 6 | m4C | CCWWGGGATGNNNNNNNNN[NNNN], |
| | G | | | | | CCWWGGATGNNNNNNNNN[NNNN] |
| FokI | GGAT | M.Cmu51329I, M.EcoJA03PDcm, | CCWGG | 1, 5 | Unknown | CCWGGGATGNNNNNNNNN[NNNN], |
| | G | M.RorR1Dcm, M.Sen8391Dcm, M.ZalSM2II | | | | CCWGGATGNNNNNNNNN[NNNN] |
| FokI | GGAT | M.CocIII, M.Fsi4947II, M.TdeIII, | GGNCC | 1, 5 | m4C | GGATGGNCCNNNNN[NNNN] |
| | G | M.Tph12270I | | | | |
| FokI | GGAT | M.Cpa18696III, M.Ype19I, M.YpeDodI, | CCWGG | 2, 4 | Unknown | CCWGGATGNNNNNNNNN[NNNN] |
| | G | M.YpeEDI, M.YpeJ9I, M.YpePGI | | | | |
| FokI | GGAT | M.CviRI, M.Hpy298VIII, M.Hpy299VIII, | TGCA | 1, 4 | m6A | GGATGCANNNNNNN[NNNN] |
| | G | M.Hpy30VI, M.Hpy32V, M.Hpy57II, | | | | |
| | | M.Hpy66VIII, M.HpyFVI, M.HpyUM032VIII, | | | | |
| | | M.HpyUM037VIII | | | | |
| FokI | GGAT | M.Dac11109II, M.Hfo6591I, M.MhuII, | GTAC | 1, 4 | m4C | GGATGTACNNNNNN[NNNN] |
| | G | M.MjaV, M.MlaZII, M.MspLW5I, M.RsaI | | | | |
| FokI | GGAT | M.DdeI | CTNAG | 1, 5 | m5C | CTNAGGATGNNNNNNNNN[NNNN] |
| | G | | | | | |
| FokI | GGAT | M.DsaV, M.Ecl18kI, M.FpsJVI, M.NlaX, | CCNGG | 2, 4 | m5C | CCNGGATGNNNNNNNNN[NNNN] |
| | G | M.SenPI, M.SsoII | | | | |
| FokI | GGAT | M.Eco29kI, M.NgoAIII, M.SacII | CCGCGG | 2, 5 | m5C | CCGCGGATGNNNNNNNNN[NNNN] |
| | G | | | | | |
| FokI | GGAT | M.EcoNI | CCTNNNN | 2, 10 | m4C | CCTNNNNNAGGATGNNNNNNNNN[NNNN] |
| | G | | NAGG | | | |
| FokI | GGAT | M.EfaRFII, M.Mae7806II | CCGG | 2, 3 | m4C | CCGGATGNNNNNNNNN[NNNN] |
| | G | | | | | |
| FokI | GGAT | M.Esp1396I | CCANNNN | 3, 9 | m6A | CCANNGGATGGNNNNNNNN[NNNN] |
| | G | | NTGG | | | |
| FokI | GGAT | M.FatI | CATG | 1, 4 | m5C | CATGGATGNNNNNNNNN[NNNN] |
| | G | | | | | |
| FokI | GGAT | M.FisAW1I, M.ThaI, M.Tph12270II | CGCG | 1, 4 | m4C | CGCGGATGNNNNNNNNN[NNNN] |
| | G | | | | | |
| FokI | GGAT | M.FnoB1II, M.Hal24586I, M.Hpy298V, | CCGG | 1, 4 | m4C | CCGGGATGNNNNNNNNN[NNNN], |
| | G | M.Hpy299IX, M.Hpy30V, M.Hpy32XI, | | | | CCGGATGNNNNNNNNN[NNNN] |
| | | M.Hpy57V, M.Hpy66IX, M.Hpy99VIII, | | | | |
| | | M.HpyFV, M.HpyUM032IX, M.HpyUM037IX, | | | | |
| | | M.MjaVI, M.PspJDRI, M.TmeBII | | | | |
| FokI | GGAT | M.FpsJI, M.HpaII, M.Nme18II, M.NmeAI | CCGG | 2, 3 | m5C | CCGGATGNNNNNNNNN[NNNN] |
| | G | | | | | |
| FokI | GGAT | M.Gel16401IV | CTGG | 3 | m5C | CTGGATGNNNNNNNNN[NNNN] |
| | G | | | | | |
| FokI | GGAT | M.Hpy188I, M.Hpy298IX, M.Hpy299V, | TCNGA | 1, 5 | m6A | TCGGATGNNNNNNNNN[NNNN] |
| | G | M.Hpy66V, M.HpyUM032V | | | | |
| FokI | GGAT | M.Hpy30VIII, M.Hpy32VIII, M.Hpy57III, | TCNNGA | 1, 6 | m6A | TCNGGATGNNNNNNNNN[NNNN] |
| | G | M.Hpy66VI, M.Hpy99XVIII, M.HpyFVIII, | | | | |
| | | M.HpyPVIII | | | | |
| FokI | GGAT | M.Hpy30X, M.Hpy57VIII, M.HpyFXI, M.MhuI | CTNAG | 1, 5 | m4C | CTNAGGATGNNNNNNNNN[NNNN] |
| | G | | | | | |
| FokI | GGAT | M.Hpy99IV, M.HpyFORFX | CCNNGG | 1, 6 | m4C | CCNNGGGATGNNNNNNNNN[NNNN], |
| | G | | | | | CCNNGGATGNNNNNNNNN[NNNN] |
| FokI | GGAT | M.HpyAV, M.Nme18IV | GAAGG | 3, 4 | m6A, | GAAGGATGNNNNNNNNN[NNNN] |
| | G | | | | m5C | |
| FokI | GGAT | M.HpyD27I | GAGG | 2, 4 | m6A, | GAGGGATGNNNNNNNNN[NNNN], |
| | G | | | | m5C | GAGGATGNNNNNNNNN[NNNN] |
| FokI | GGAT | M.MjaII | GGNCC | 1, 5 | m5C | GGATGGNCCNNNNN[NNNN] |
| | G | | | | | |
| FokI | GGAT | M.Msp1II | CCAGG | 5 | m4C | CCAGGGATGNNNNNNNNN[NNNN], |
| | G | | | | | CCAGGATGNNNNNNNNN[NNNN] |
| FokI | GGAT | M.Msp42II | CCWGG | 1, 5 | m4C | CCWGGGATGNNNNNNNNN[NNNN], |
| | G | | | | | CCWGGATGNNNNNNNNN[NNNN] |
| FokI | GGAT | M.NheI | GCTAGC | 1, 6 | m4C | GGATGCTAGCNNNN[NNNN] |
| | G | | | | | |
| FokI | GGAT | M.Nme18III | TCTGG | 2, 4 | m5C | TCTGGATGNNNNNNNNN[NNNN] |
| | G | | | | | |
| FokI | GGAT | M.NmeDI | RCCGGB | 2, 5 | m5C | RCCGGGATGNNNNNNNNN[NNNN] |
| | G | | | | | |
| FokI | GGAT | M.NmeMC58III | TCTGG | 5 | m5C | TCTGGGATGNNNNNNNNN[NNNN], |
| | G | | | | | TCTGGATGNNNNNNNNN[NNNN] |
| FokI | GGAT | M.Nsp209III, M.Nsp51109II | CTCGAG | 1, 6 | m5C | CTCGAGGATGNNNNNNNNN[NNNN] |
| | G | | | | | |
| FokI | GGAT | M.Pam7686I | CCATGG | 1, 6 | m5C | CCATGGGATGNNNNNNNNN[NNNN], |
| | G | | | | | CCATGGATGNNNNNNNNN[NNNN] |
| FokI | GGAT | M.Pfa23572II | CGATCG | 1, 6 | m5C | CGATCGGATGNNNNNNNNN[NNNN] |
| | G | | | | | |
| FokI | GGAT | M.Pla5I | CTAG | 1, 4 | Unknown | CTAGGATGNNNNNNNNN[NNNN] |
| | G | | | | | |
| FokI | GGAT | M.Sam53668II | CCATGG | 1, 6 | Unknown | CCATGGGATGNNNNNNNNN[NNNN], |
| | G | | | | | CCATGGATGNNNNNNNNN[NNNN] |
| FokI | GGAT | M.Sen1781III | CCWWGG | 1, 6 | Unknown | CCWWGGGATGNNNNNNNNN[NNNN], |
| | G | | | | | CCWWGGATGNNNNNNNNN[NNNN] |
| FokI | GGAT | M.SonIII | GACNNNN | 2, 8 | m6A | GACNGGATGCNNNNNNNN[NNNN] |
| | G | | TGC | | | |
| FokI | GGAT | M.TdeII | GAAGAG | 5, 6 | m6A, | GAAGAGGATGNNNNNNNNN[NNNN] |
| | G | | | | m4C | |
| FokI | GGAT | M.TspRI | CASTG | 1, 5 | m5C | CASTGGATGNNNNNNNNN[NNNN] |
| | G | | | | | |
| FokI | GGAT | M.XcmI | CCANNNN | 3, 13 | m6A | CCANNNNNNGGATGGNNNNNNNN[NNNN] |
| | G | | NNNNNTG | | | |
| | | | G | | | |
| FokI | GGAT | M1.AgoG2I, M2.AgoG2I | ACTGG | 2, 5 | m4C | ACTGGGATGNNNNNNNNN[NNNN], |
| | G | | | | | ACTGGATGNNNNNNNNN[NNNN] |
| FokI | GGAT | M1.Bag18758II, M2.Bag18758II | CACGGG | 3, 5 | Unknown | CACGGGATGNNNNNNNNN[NNNN] |
| | G | | | | | |
| FokI | GGAT | M1.BccI, M1.Hpy30XI, M2.Hpy66X, | GATGG | 2 | m6A | GGATGGNNNNNNNN[NNNN] |
| | G | M1.Jsp2502I, M2.MmyCVI | | | | |
| FokI | GGAT | M1.BcnI, M2.BcnI, M.NciI | CCSGG | 2, 4 | m4C | CCSGGATGNNNNNNNNN[NNNN] |
| | G | | | | | |
| FokI | GGAT | M1.BfiI | ACTGGG | 5 | m4C | ACTGGGATGNNNNNNNNN[NNNN] |
| | G | | | | | |
| FokI | GGAT | M1.BhaI, M1.Bst19I, M.Fnu10562III, | GATGC | 3 | m6A | GGATGCNNNNNNNN[NNNN] |
| | G | M1.Mbo45IV, M2.Mbo45IV | | | | |
| FokI | GGAT | M1.BspACI | GCGG | 4 | m5C | GCGGGATGNNNNNNNNN[NNNN], |
| | G | | | | | GCGGATGNNNNNNNNN[NNNN] |
| FokI | GGAT | M1.Csp16704IV, M2.Csp16704IV, | GATGC | 2, 3 | m6A | GGATGCNNNNNNNN[NNNN] |
| | G | M.Lsp10393I, M.Mha183II, M.Mha185II, | | | | |
| | | M.Mha807II, M.Mva1312II | | | | |
| FokI | GGAT | M1.Hpy299X, M2.Hpy32XIII, M1.HpyFXIII, | GATGG | 2, 3 | m6A | GGATGGNNNNNNNN[NNNN] |
| | G | M2.HpyFXIII, M2.HpyUM037VI, M1.McaCI, | | | | |
| | | M2.McaCI, M1.PspHUN102II, | | | | |
| | | M2.PspHUN102II | | | | |
| FokI | GGAT | M1.Hpy32II | GRRGA | 5 | m6A | GRGGATGNNNNNNNNN[NNNN] |
| | G | | | | | |
| FokI | GGAT | M1.LplAG30I | GAAGG | 5 | m5C | GAAGGGATGNNNNNNNNN[NNNN], |
| | G | | | | | GAAGGATGNNNNNNNNN[NNNN] |
| FokI | GGAT | M2.BccI, M2.Hpy299X, M1.Hpy66X, | GATGG | 3 | m6A | GGATGGNNNNNNNN[NNNN] |
| | G | M1.HpyC1I, M2.HpyC1I, M1.HpyUM032X, | | | | |
| | | M2.Jsp2502I, M1.MmyCVI | | | | |
| FokI | GGAT | M2.BhaI | GATGC | 2 | m6A | GGATGCNNNNNNNN[NNNN] |
| | G | | | | | |
| FokI | GGAT | M2.HpyAVI, M1.MnlI | GAGG | 4 | m5C | GAGGGATGNNNNNNNNN[NNNN], |
| | G | | | | | GAGGATGNNNNNNNNN[NNNN] |
| StsI | GGAT | M.AbaBs12I, M.Awo1030I, M.Cdu23823I, | CCWGG | 1, 5 | m5C | CCWGGGATGNNNNNNNNNN[NNNN], |
| | G | M.Csa8155II, M.Cun9529I, M.EasL1Dcm, | | | | CCWGGATGNNNNNNNNNN[NNNN] |
| | | M.Eba57Dcm, M.Ec134399Dcm, | | | | |
| | | M.Eco12761Dcm, M.Eco3609Dcm, | | | | |
| | | M.Eco4255Dcm, M.EcoVR50Dcm, | | | | |
| | | M.EsaSP1II, M.Kpn34618Dcm, | | | | |
| | | M.Kpn38547Dcm, M.Kpn39I, M.Kpn43816I, | | | | |
| | | M.Kpn677ORFDcm, M.Kpn928Dcm, | | | | |
| | | M.KpnNIH1Dcm, M.KpnNIH10Dcm, | | | | |
| | | M.KpnNIH30Dcm, M.Kva120Dcm, M.Lsp48I, | | | | |
| | | M.Pmi1I, M.SpaD2III, M.SplRp8II, | | | | |
| | | M.SptADcm, M.Tsu2489III | | | | |
| StsI | GGAT | M.AciI | GCGG | 2, 4 | m5C | GCGGGATGNNNNNNNNNN[NNNN], |
| | G | | | | | GCGGATGNNNNNNNNNN[NNNN] |
| StsI | GGAT | M.Ama55I, M.CnaPQ2III, M.Rmo1926II, | CGGCCG | 1, 6 | m5C | CGGCCGGATGNNNNNNNNNN[NNNN] |
| | G | M.SenC1765IV, M.SspG1I, M.XorPXII | | | | |
| StsI | GGAT | M.AquI | CYCGRG | 1, 6 | m5C | CYCGRGGATGNNNNNNNNNN[NNNN], |
| | G | | | | | CYCGGGATGNNNNNNNNNN[NNNN] |
| StsI | GGAT | M.AspU41II, M.BisIII, M.BsuW23II, | CCWGG | 2, 4 | m5C | CCWGGATGNNNNNNNNNN[NNNN] |
| | G | M.CnaPQ2II, M.EcoO6Dcm, M.Eco12581Dcm, | | | | |
| | | M.Eco1655Dcm, M.Eco29787Dcm, | | | | |
| | | M.Eco3024Dcm, M.Eco3317Dcm, | | | | |
| | | M.Eco3325Dcm, M.Eco3740Dcm, | | | | |
| | | M.Eco3911Dcm, M.Eco4211Dcm, | | | | |
| | | M.Eco4465Dcm, M.Eco600Dcm, | | | | |
| | | M.Eco644Dcm, M.Eco86Dcm, | | | | |
| | | M.Eco9001Dcm, M.Eco9387Dcm, | | | | |
| | | M.EcoE1140Dcm, M.EcoE455Dcm, | | | | |
| | | M.EcoGDcm, M.EcoNU14Dcm, M.EcoRII, | | | | |
| | | M.Kpn223III, M.Kpn35657II, M.Kpn36Dcm, | | | | |
| | | M.Kpn555I, M.Kpn62629II, M.KpnAATV, | | | | |
| | | M.Kqu603Dcm, M.Psp345I, M.Sen158Dcm, | | | | |
| | | M.Sen641Dcm, M.SenA46Dcm, | | | | |
| | | M.SenAboDcm, M.TcoKWC4II | | | | |
| StsI | GGAT | M.AvaV, M.SliSI | GATC | 1, 4 | m4C | GGATGATCNNNNNNN[NNNN] |
| | G | | | | | |
| StsI | GGAT | M.BceSII | GGWCC | 1, 5 | m5C | GGATGGWCCNNNNNN[NNNN] |
| | G | | | | | |
| StsI | GGAT | M.BcoSlacII, M.MspLW5III, M.Nbr128I, | CTCGAG | 1, 6 | m4C | CTCGAGGATGNNNNNNNNNN[NNNN] |
| | G | M.Psy18884II, M.Tam77409II, M.TbrGE1II, | | | | |
| | | M.TpaRLII | | | | |
| StsI | GGAT | M.BepI, M.FpsJV, M.Gel16401III, M.Pdi8503I | CGCG | 1, 4 | m5C | CGCGGATGNNNNNNNNNN[NNNN] |
| | G | | | | | |
| StsI | GGAT | M.BfaSIII, M.Ccl10114I, M.CfrB38I, | ATGCAT | 2, 5 | m6A | GGATGCATNNNNNNN[NNNN] |
| | G | M.CfrH1I, M.EcoGVI, M.EcoKII, | | | | |
| | | M.Fnu10562II, M.SbaUIV, M.Sbo12419III, | | | | |
| | | M.Sbo268II, M.Sen10384II, M.Sen10708II, | | | | |
| | | M.Sen1080II, M.Sen1175III, M.Sen13IV, | | | | |
| | | M.Sen13311IV, M.Sen1387II, M.Sen1427III, | | | | |
| | | M.Sen14882III, M.Sen15791III, M.Sen158III, | | | | |
| | | M.Sen16I, M.Sen1655III, M.Sen1676III, | | | | |
| | | M.Sen1677III, M.Sen1728III, M.Sen1735III, | | | | |
| | | M.Sen1736IV, M.Sen1764III, M.Sen1766III, | | | | |
| | | M.Sen1781IV, M.Sen1783III, M.Sen18569II, | | | | |
| | | M.Sen1878III, M.Sen1880III, M.Sen1896III, | | | | |
| | | M.Sen1898III, M.Sen1899III, M.Sen1903III, | | | | |
| | | M.Sen1906III, M.Sen1908III, M.Sen1910III, | | | | |
| | | M.Sen1921III, M.Sen1927II, M.Sen195II, | | | | |
| | | M.Sen2050II, M.Sen2064III, M.Sen2069III, | | | | |
| | | M.Sen22462I, M.Sen255II, M.Sen318III, | | | | |
| | | M.Sen3387III, M.Sen3890III, M.Sen483III, | | | | |
| | | M.Sen624III, M.Sen641III, M.Sen7378II, | | | | |
| | | M.Sen8391III, M.Sen8692III, M.SenA46III, | | | | |
| | | M.SenAbaII, M.SenAboII, M.SenAnaIII, | | | | |
| | | M.SenC1736III, M.SenC1765III, | | | | |
| | | M.SenC1808IV, M.SenC1810III, M.SenJIII, | | | | |
| | | M.SenL1II, M.SenL15III, M.SenN1660II, | | | | |
| | | M.SenSARA26II, M.SenSPBIII, M.SenTFIII | | | | |
| StsI | GGAT | M.Bhy27164IV, M.BstNI, M.EcoDHB4Dcm, | CCWGG | 2, 4 | m4C | CCWGGATGNNNNNNNNNN[NNNN] |
| | G | M.EcoK54Dcm, M.Gth3570I, M.Hla49239I, | | | | |
| | | M.MvaI, M.Pdi8503II, M.Sso30807Dcm, | | | | |
| | | M.YpeI, M.Ype41I, M.YpeShI | | | | |
| StsI | GGAT | M.BsoBI | CYCGRG | 1, 6 | m4C | CYCGRGGATGNNNNNNNNNN[NNNN], |
| | G | | | | | CYCGGGATGNNNNNNNNNN[NNNN] |
| StsI | GGAT | M.Bsp14III, M.Bsp3003I, M.Bsp3004I, | GATC | 1, 4 | m5C | GGATGATCNNNNNNN[NNNN] |
| | G | M.CalB3III, M.CpeAIII, M.Esu35585I, | | | | |
| | | M.FpsJIV, M.Lba2031I, M.Lbo2004I, | | | | |
| | | M.LlaKR2I, M.Lmo1042I, M.Lmo7956II, | | | | |
| | | M.Lsp10393II, M.MspI7I, M.Sau3AI, M.Sba3I, | | | | |
| | | M.Sin395I, M.Spn23FI, M.Sth368I | | | | |
| StsI | GGAT | M.BstXI | CCANNNN | 3, 10 | m6A | CCANNNGGATGGNNNNNNNNN[NNNN] |
| | G | | NNTGG | | | |
| StsI | GGAT | M.BsuFI, M.CpeAIV, M.MspI | CCGG | 1, 4 | m5C | CCGGGATGNNNNNNNNNN[NNNN], |
| | G | | | | | CCGGATGNNNNNNNNNN[NNNN] |
| StsI | GGAT | M.Cab13497I, M.Dac11109III, M.Dco13527I, | CTAG | 1, 4 | m4C | CTAGGATGNNNNNNNNNN[NNNN] |
| | G | M.Djo10085I, M.Hbo11551I, M.Hka19301III, | | | | |
| | | M.Hme33500I, M.HsaR1I, M.Hsi33800I, | | | | |
| | | M.HspKM1WII, M.HspNII, M.HtuI, M.HvoDSI, | | | | |
| | | M.Lba2029II, M.Mbo45II, M.MjaI, M.MthZI, | | | | |
| | | M.Nas12278I, M.Rfl3010I, M.SsmMI | | | | |
| StsI | GGAT | M.CagVI | TCCGGA | 1, 6 | m6A | TCCGGATGNNNNNNNNNN[NNNN] |
| | G | | | | | |
| StsI | GGAT | M.Cdi630III | CCSSGG | 2, 5 | m4C | CCSSGGATGNNNNNNNNNN[NNNN] |
| | G | | | | | |
| StsI | GGAT | M.Cfr9I, M.SmaI, M.Sma36365II, M.Xca85III, | CCCGGG | 2, 5 | m4C | CCCGGGATGNNNNNNNNNN[NNNN] |
| | G | M.XcyI, M.XmaI, M.XveII | | | | |
| StsI | GGAT | M.CfrBI, M.Sen1735IV, M.SenAnaIV | CCWWGG | 1, 6 | m4C | CCWWGGGATGNNNNNNNNNN[NNNN], |
| | G | | | | | CCWWGGATGNNNNNNNNNN[NNNN] |
| StsI | GGAT | M.Cmu51329I, M.EcoJA03PDcm, | CCWGG | 1, 5 | Unknown | CCWGGGATGNNNNNNNNNN[NNNN], |
| | G | M.RorR1Dcm, M.Sen8391Dcm, M.ZalSM2II | | | | CCWGGATGNNNNNNNNNN[NNNN] |
| StsI | GGAT | M.CocIII, M.Fsi4947II, M.TdeIII, | GGNCC | 1, 5 | m4C | GGATGGNCCNNNNNN[NNNN] |
| | G | M.Tph12270I | | | | |
| StsI | GGAT | M.Cpa18696III, M.Ype19I, M.YpeDodI, | CCWGG | 2, 4 | Unknown | CCWGGATGNNNNNNNNNN[NNNN] |
| | G | M.YpeEDI, M.YpeJ9I, M.YpePGI | | | | |
| StsI | GGAT | M.CviRI, M.Hpy298VIII, M.Hpy299VIII, | TGCA | 1, 4 | m6A | GGATGCANNNNNNNN[NNNN] |
| | G | M.Hpy30VI, M.Hpy32V, M.Hpy57II, | | | | |
| | | M.Hpy66VIII, M.HpyFVI, M.HpyUM032VIII, | | | | |
| | | M.HpyUM037VIII | | | | |
| StsI | GGAT | M.Dac11109II, M.Hfo6591I, M.MhuII, | GTAC | 1, 4 | m4C | GGATGTACNNNNNNN[NNNN] |
| | G | M.MjaV, M.MlaZII, M.MspLW5I, M.RsaI | | | | |
| StsI | GGAT | M.DdeI | CTNAG | 1, 5 | m5C | CTNAGGATGNNNNNNNNNN[NNNN] |
| | G | | | | | |
| StsI | GGAT | M.DsaV, M.Ecl18kI, M.FpsJVI, M.NlaX, | CCNGG | 2, 4 | m5C | CCNGGATGNNNNNNNNNN[NNNN] |
| | G | M.SenPI, M.SsoII | | | | |
| StsI | GGAT | M.Eco29kI, M.NgoAIII, M.SacII | CCGCGG | 2, 5 | m5C | CCGCGGATGNNNNNNNNNN[NNNN] |
| | G | | | | | |
| StsI | GGAT | M.EcoNI | CCTNNNN | 2, 10 | m4C | CCTNNNNNAGGATGNNNNNNNNNN[NNNN] |
| | G | | NAGG | | | |
| StsI | GGAT | M.EfaRFII, M.Mae7806II | CCGG | 2, 3 | m4C | CCGGATGNNNNNNNNNN[NNNN] |
| | G | | | | | |
| StsI | GGAT | M.Esp1396I | CCANNNN | 3, 9 | m6A | CCANNGGATGGNNNNNNNNN[NNNN] |
| | G | | NTGG | | | |
| StsI | GGAT | M.FatI | CATG | 1, 4 | m5C | CATGGATGNNNNNNNNNN[NNNN] |
| | G | | | | | |
| StsI | GGAT | M.FisAW1I, M.ThaI, M.Tph12270II | CGCG | 1, 4 | m4C | CGCGGATGNNNNNNNNNN[NNNN] |
| | G | | | | | |
| StsI | GGAT | M.FnoB1II, M.Hal24586I, M.Hpy298V, | CCGG | 1, 4 | m4C | CCGGGATGNNNNNNNNNN[NNNN], |
| | G | M.Hpy299IX, M.Hpy30V, M.Hpy32XI, | | | | CCGGATGNNNNNNNNNN[NNNN] |
| | | M.Hpy57V, M.Hpy66IX, M.Hpy99VIII, | | | | |
| | | M.HpyFV, M.HpyUM032IX, M.HpyUM037IX, | | | | |
| | | M.MjaVI, M.PspJDRI, M.TmeBII | | | | |
| StsI | GGAT | M.FpsJI, M.HpaII, M.Nme18II, M.NmeAI | CCGG | 2, 3 | m5C | CCGGATGNNNNNNNNNN[NNNN] |
| | G | | | | | |
| StsI | GGAT | M.Gel16401IV | CTGG | 3 | m5C | CTGGATGNNNNNNNNNN[NNNN] |
| | G | | | | | |
| StsI | GGAT | M.Hpy188I, M.Hpy298IX, M.Hpy299V, | TCNGA | 1, 5 | m6A | TCGGATGNNNNNNNNNN[NNNN] |
| | G | M.Hpy66V, M.HpyUM032V | | | | |
| StsI | GGAT | M.Hpy30VIII, M.Hpy32VIII, M.Hpy57III, | TCNNGA | 1, 6 | m6A | TCNGGATGNNNNNNNNNN[NNNN] |
| | G | M.Hpy66VI, M.Hpy99XVIII, M.HpyFVIII, | | | | |
| | | M.HpyPVIII | | | | |
| StsI | GGAT | M.Hpy30X, M.Hpy57VIII, M.HpyFXI, M.MhuI | CTNAG | 1, 5 | m4C | CTNAGGATGNNNNNNNNNN[NNNN] |
| | G | | | | | |
| StsI | GGAT | M.Hpy99IV, M.HpyFORFX | CCNNGG | 1, 6 | m4C | CCNNGGGATGNNNNNNNNNN[NNNN], |
| | G | | | | | CCNNGGATGNNNNNNNNNN[NNNN] |
| StsI | GGAT | M.HpyAV, M.Nme18IV | GAAGG | 3, 4 | m6A, | GAAGGATGNNNNNNNNNN[NNNN] |
| | G | | | | m5C | |
| StsI | GGAT | M.HpyD27I | GAGG | 2, 4 | m6A, | GAGGGATGNNNNNNNNNN[NNNN], |
| | G | | | | m5C | GAGGATGNNNNNNNNNN[NNNN] |
| StsI | GGAT | M.MjaII | GGNCC | 1, 5 | m5C | GGATGGNCCNNNNNN[NNNN] |
| | G | | | | | |
| StsI | GGAT | M.Msp1II | CCAGG | 5 | m4C | CCAGGGATGNNNNNNNNNN[NNNN], |
| | G | | | | | CCAGGATGNNNNNNNNNN[NNNN] |
| StsI | GGAT | M.Msp42II | CCWGG | 1, 5 | m4C | CCWGGGATGNNNNNNNNNN[NNNN], |
| | G | | | | | CCWGGATGNNNNNNNNNN[NNNN] |
| StsI | GGAT | M.NheI | GCTAGC | 1, 6 | m4C | GGATGCTAGCNNNNN[NNNN] |
| | G | | | | | |
| Stsl | GGAT | M.Nme18III | TCTGG | 2, 4 | m5C | TCTGGATGNNNNNNNNNN[NNNN] |
| | G | | | | | |
| StsI | GGAT | M.NmeDI | RCCGGB | 2, 5 | m5C | RCCGGGATGNNNNNNNNNN[NNNN] |
| | G | | | | | |
| StsI | GGAT | M.NmeMC58III | TCTGG | 5 | m5C | TCTGGGATGNNNNNNNNNN[NNNN], |
| | G | | | | | TCTGGATGNNNNNNNNNN[NNNN] |
| StsI | GGAT | M.Nsp209III, M.Nsp51109II | CTCGAG | 1, 6 | m5C | CTCGAGGATGNNNNNNNNNN[NNNN] |
| | G | | | | | |
| StsI | GGAT | M.Pam7686I | CCATGG | 1, 6 | m5C | CCATGGGATGNNNNNNNNNN[NNNN], |
| | G | | | | | CCATGGATGNNNNNNNNNN[NNNN] |
| StsI | GGAT | M.Pfa23572II | CGATCG | 1, 6 | m5C | CGATCGGATGNNNNNNNNNN[NNNN] |
| | G | | | | | |
| StsI | GGAT | M.Pla5I | CTAG | 1, 4 | Unknown | CTAGGATGNNNNNNNNNN[NNNN] |
| | G | | | | | |
| StsI | GGAT | M.Sam53668II | CCATGG | 1, 6 | Unknown | CCATGGGATGNNNNNNNNNN[NNNN], |
| | G | | | | | CCATGGATGNNNNNNNNNN[NNNN] |
| StsI | GGAT | M.Sen1781III | CCWWGG | 1, 6 | Unknown | CCWWGGGATGNNNNNNNNNN[NNNN], |
| | G | | | | | CCWWGGATGNNNNNNNNNN[NNNN] |
| StsI | GGAT | M.SonIII | GACNNNN | 2, 8 | m6A | GACNGGATGCNNNNNNNNN[NNNN] |
| | G | | TGC | | | |
| StsI | GGAT | M.TdeII | GAAGAG | 5, 6 | m6A, | GAAGAGGATGNNNNNNNNNN[NNNN] |
| | G | | | | m4C | |
| StsI | GGAT | M.TspRI | CASTG | 1, 5 | m5C | CASTGGATGNNNNNNNNNN[NNNN] |
| | G | | | | | |
| StsI | GGAT | M.XcmI | CCANNNN | 3, 13 | m6A | CCANNNNNNGGATGGNNNNNNNNN[NNNN] |
| | G | | NNNNNTG | | | |
| | | | G | | | |
| StsI | GGAT | M1.AgoG2I, M2.AgoG2I | ACTGG | 2, 5 | m4C | ACTGGGATGNNNNNNNNNN[NNNN], |
| | G | | | | | ACTGGATGNNNNNNNNNN[NNNN] |
| StsI | GGAT | M1.Bag18758II, M2.Bag18758II | CACGGG | 3, 5 | Unknown | CACGGGATGNNNNNNNNNN[NNNN] |
| | G | | | | | |
| StsI | GGAT | M1.BccI, M1.Hpy30XI, M2.Hpy66X, | GATGG | 2 | m6A | GGATGGNNNNNNNNN[NNNN] |
| | G | M1.Jsp2502I, M2.MmyCVI | | | | |
| StsI | GGAT | M1.BcnI, M2.BcnI, M.NciI | CCSGG | 2, 4 | m4C | CCSGGATGNNNNNNNNNN[NNNN] |
| | G | | | | | |
| StsI | GGAT | M1.BfiI | ACTGGG | 5 | m4C | ACTGGGATGNNNNNNNNNN[NNNN] |
| | G | | | | | |
| StsI | GGAT | M1.BhaI, M1.Bst19I, M.Fnu10562III, | GATGC | 3 | m6A | GGATGCNNNNNNNNN[NNNN] |
| | G | M1.Mbo45IV, M2.Mbo45IV | | | | |
| StsI | GGAT | M1.BspACI | GCGG | 4 | m5C | GCGGGATGNNNNNNNNNN[NNNN], |
| | G | | | | | GCGGATGNNNNNNNNNN[NNNN] |
| StsI | GGAT | M1.Csp16704IV, M2.Csp16704IV, | GATGC | 2, 3 | m6A | GGATGCNNNNNNNNN[NNNN] |
| | G | M.Lsp10393I, M.Mha183II, M.Mha185II, | | | | |
| | | M.Mha807II, M.Mva1312II | | | | |
| StsI | GGAT | M1.Hpy299X, M2.Hpy32XIII, M1.HpyFXIII, | GATGG | 2, 3 | m6A | GGATGGNNNNNNNNN[NNNN] |
| | G | M2.HpyFXIII, M2.HpyUM037VI, M1.McaCI, | | | | |
| | | M2.McaCI, M1.PspHUN102II, | | | | |
| | | M2.PspHUN102II | | | | |
| StsI | GGAT | M1.Hpy32II | GRRGA | 5 | m6A | GRGGATGNNNNNNNNNN[NNNN] |
| | G | | | | | |
| StsI | GGAT | M1.LplAG30I | GAAGG | 5 | m5C | GAAGGGATGNNNNNNNNNN[NNNN], |
| | G | | | | | GAAGGATGNNNNNNNNNN[NNNN] |
| StsI | GGAT | M2.BccI, M2.Hpy299X, M1.Hpy66X, | GATGG | 3 | m6A | GGATGGNNNNNNNNN[NNNN] |
| | G | M1.HpyC1I, M2.HpyC1I, M1.HpyUM032X, | | | | |
| | | M2.Jsp2502I, M1.MmyCVI | | | | |
| StsI | GGAT | M2.BhaI | GATGC | 2 | m6A | GGATGCNNNNNNNNN[NNNN] |
| | G | | | | | |
| StsI | GGAT | M2.HpyAVI, M1.MnlI | GAGG | 4 | m5C | GAGGGATGNNNNNNNNNN[NNNN], |
| | G | | | | | GAGGATGNNNNNNNNNN[NNNN] |
| Acc36I, BfuAI, | ACCT | M.AauTCI, M.AchA6II, M.Asp146I, | TTAA | 1, 4 | m6A | TTAACCTGCNNNN[NNNN] |
| BspMI, BveI | GC | M.Asp24188I, M.Asp31YII, M.AspU41I, | | | | |
| | | M.BspJKG1III, M.EsaDix4I, M.EsaDix5I, | | | | |
| | | M.Llu27648II, M.Mch9957II, M.Mru1279VI, | | | | |
| | | M.MseI, M.Msi9946I, M.Sam53668III, | | | | |
| | | M.Sth20745I, M.Tam 77409I | | | | |
| Acc36I, BfuAI, | ACCT | M.AbaBs12I, M.Awo1030I, M.Cdu23823I, | CCWGG | 1, 5 | m5C | ACCTGCCWGG[NNNN] |
| BspMI, BveI | GC | M.Csa8155II, M.Cun9529I, M.EasL1Dcm, | | | | |
| | | M.Eba57Dcm, M.Ecl34399Dcm, | | | | |
| | | M.Eco12761Dcm, M.Eco3609Dcm, | | | | |
| | | M.Eco4255Dcm, M.EcoVR50Dcm, | | | | |
| | | M.EsaSP1II, M.Kpn34618Dcm, | | | | |
| | | M.Kpn38547Dcm, M.Kpn39I, M.Kpn43816I, | | | | |
| | | M.Kpn677ORFDcm, M.Kpn928Dcm, | | | | |
| | | M.KpnNIH1Dcm, M.KpnNIH10Dcm, | | | | |
| | | M.KpnNIH30Dcm, M.Kva120Dcm, M.Lsp48I, | | | | |
| | | M.Pmi1I, M.SpaD2III, M.SplRp8II, | | | | |
| | | M.SptADcm, M.Tsu2489III | | | | |
| Acc36I, BfuAI, | ACCT | M.Acc65I, M.Eco86I, M.KpnI, M.Lal216III, | GGTACC | 3, 4 | m6A | GGTACCTGCNNNN[NNNN] |
| BspMI, BveI | GC | M.Sen3387IV, M.Sen8391IV | | | | |
| Acc36I, BfuAI, | ACCT | M.Acc65VI, M.SenAZIII | CTKMAG | 2, 5 | m6A | ACCTGCAGNN[NNNN] |
| BspMI, BveI | GC | | | | | |
| Acc36I, BfuAI, | ACCT | M.AccI, M.FpsFPG3II, M.SdeAIV | GTMKAC | 2, 5 | m6A | GTMKACCTGCNNNN[NNNN] |
| BspMI, BveI | GC | | | | | |
| Acc36I, BfuAI, | ACCT | M.AciI | CCGC | 1, 3 | m5C | ACCTGCGGNN[NNNN], |
| BspMI, BveI | GC | | | | | ACCTGCCGCN[NNNN] |
| Acc36I, BfuAI, | ACCT | M.Ade56712I, M.Asp588III, M.AveCB51II, | CTGCAG | 2, 5 | m6A | ACCTGCAGNN[NNNN] |
| BspMI, BveI | GC | M.BbrUIII, M.Blo30698I, M.BsuBI, | | | | |
| | | M.CpaYL7III, M.Dba7044I, M.Dfa45958II, | | | | |
| | | M.Eco12581I, M.Eco2012I, M.EcoGIII, | | | | |
| | | M.EcoG089I, M.Eho16691II, M.Hal5920II, | | | | |
| | | M.Lsp6406II, M.MspNR41II, M.Pae490I, | | | | |
| | | M.Pox23570I, M.PstI, M.RpaII, M.Sca3403II, | | | | |
| | | M.Tsp61I, M.XmnII, M.YenWI, M.YinY228I | | | | |
| Acc36I, BfuAI, | ACCT | M.AgsI | TTSAA | 1, 5 | m6A | TTSAACCTGCNNNN[NNNN] |
| BspMI, BveI | GC | | | | | |
| Acc36I, BfuAI, | ACCT | M.AhdI | GACNNNN | 2, 10 | m6A | GACCTGCNGTC[NNNN] |
| BspMI, BveI | GC | | NGTC | | | |
| Acc36I, BfuAI, | ACCT | M.Alw26I | GAGAC | 4, 3 | m6A, | GAGACCTGCNNNN[NNNN] |
| BspMI, BveI | GC | | | | m5C | |
| Acc36I, BfuAI, | ACCT | M.AorT14III, M.GsuRed1III, M.SalI | GTCGAC | 2, 5 | m6A | GTCGACCTGCNNNN[NNNN] |
| BspMI, BveI | GC | | | | | |
| Acc36I, BfuAI, | ACCT | M.AplI | CTGCAG | 3, 4 | m5C | ACCTGCAGNN[NNNN] |
| BspMI, BveI | GC | | | | | |
| Acc36I, BfuAI, | ACCT | M.AvaIX, M.Cfr10I, M.Nme18VI, M.VchAI, | RCCGGY | 2, 5 | m5C | ACCTGCCGGY [NNNN] |
| BspMI, BveI | GC | M.Vch0395I | | | | |
| Acc36I, BfuAI, | ACCT | M.BamWS8I, M.CthV, M.EfaRFI, M.Saf8902II, | GCWGC | 2, 4 | m5C | ACCTGCWGCN[NNNN] |
| BspMI, BveI | GC | M.TacII, M.TcoKWC4III | | | | |
| Acc36I, BfuAI, | ACCT | M.BanLII, M.CpeAII, M.SinI | GGWCC | 2, 4 | m5C | GGACCTGCNNNN[NNNN] |
| BspMI, BveI | GC | | | | | |
| Acc36I, BfuAI, | ACCT | M.BbvI, M.BceSIV | GCAGC | 2, 4 | m5C | ACCTGCTGCN[NNNN], |
| BspMI, BveI | GC | | | | | ACCTGCAGCN[NNNN] |
| Acc36I, BfuAI, | ACCT | M.Bce16656II, M.Bce22E1II, M.Bce25416II, | GTWWAC | 2, 5 | m6A | GTWWACCTGCNNNN[NNNN] |
| BspMI, BveI | GC | M.Bce842II, M.Bce895II, M.BceJIV, | | | | |
| | | M.BceK56II, M.Bgl2196I, M.BmaBMKII, | | | | |
| | | M.BmaBMZII, M.Bps10134II, M.Bps1651II, | | | | |
| | | M.Bps7894II, M.Bps840III, M.BpsR668II, | | | | |
| | | M.BspRB39I, M.Bth1643II, M.Cba4G11II, | | | | |
| | | M.MspNR41I, M.Oba14I, M.Pap16535I, | | | | |
| | | M.Pfa23572I, M.Pox23570II, M.PpnI, | | | | |
| | | M.PpnRB38I, M.Pth25325I | | | | |
| Acc36I, BfuAI, | ACCT | M.BceSII | GGWCC | 1, 5 | m5C | GGACCTGCNNNN[NNNN] |
| BspMI, BveI | GC | | | | | |
| Acc36I, BfuAI, | ACCT | M.BepI, M.FpsJV, M.Gel16401III, M.Pdi8503I | CGCG | 1, 4 | m5C | ACCTGCGCGN[NNNN] |
| BspMI, BveI | GC | | | | | |
| Acc36I, BfuAI, | ACCT | M.Bhy27164V, M.DraI, M.Lsp6406V, | TTTAAA | 1, 6 | m6A | TTTAAACCTGCNNNN[NNNN] |
| BspMI, BveI | GC | M.Tsu2489V | | | | |
| Acc36I, BfuAI, | ACCT | M.BspRAC04I, M.EcaI, M.Eco3936IV | GGTNACC | 3, 5 | m6A | GGTNACCTGCNNNN[NNNN] |
| BspMI, BveI | GC | | | | | |
| Acc36I, BfuAI, | ACCT | M.BstXI | CCANNNN | 3, 10 | m6A | CCACCTGCNTGG[NNNN] |
| BspMI, BveI | GC | | NNTGG | | | |
| Acc36I, BfuAI, | ACCT | M.BsuFI, M.CpeAIV, M.MspI | CCGG | 1, 4 | m5C | ACCTGCCGGN[NNNN] |
| BspMI, BveI | GC | | | | | |
| Acc36I, BfuAI, | ACCT | M.Cab13497I, M.Dac11109III, M.Dco13527I, | CTAG | 1, 4 | m4C | ACCTGCTAGN[NNNN] |
| BspMI, BveI | GC | M.Djo10085I, M.Hbo11551I, M.Hka19301III, | | | | |
| | | M.Hme33500I, M.HsaR1I, M.Hsi33800I, | | | | |
| | | M.HspKM1WII, M.HspNII, M.HtuI, M.HvoDSI, | | | | |
| | | M.Lba2029II, M.Mbo45II, M.MjaI, M.MthZI, | | | | |
| | | M.Nas12278I, M.Rfl3010I, M.SsmMI | | | | |
| Acc36I, BfuAI, | ACCT | M.Cac8I | GCNNGC | 2, 5 | m5C | ACCTGCNNGC[NNNN] |
| BspMI, BveI | GC | | | | | |
| Acc36I, BfuAI, | ACCT | M.CagV, M.Lsp6406I, M.Rsp7740I, | TTCGAA | 1, 6 | m6A | TTCGAACCTGCNNNN[NNNN] |
| BspMI, BveI | GC | M.RspPBTS2II, M.VbaLP2AI | | | | |
| Acc36I, BfuAI, | ACCT | M.CagVI | TCCGGA | 1, 6 | m6A | TCCGGACCTGCNNNN[NNNN] |
| BspMI, BveI | GC | | | | | |
| Acc36I, BfuAI, | ACCT | M.Cdi630IV, M.Ckr177III, M.CmaLM2II, | GCNGC | 2, 4 | m5C | ACCTGCNGCN[NNNN] |
| BspMI, BveI | GC | M.CocII, M.Fnu4HI, M.Fsp4HI | | | | |
| Acc36I, BfuAI, | ACCT | M.Cdi630V, M.Cdi81I, M.CdiG46II, | CAAAAA | 6 | m6A | CAAAAACCTGCNNNN[NNNN] |
| BspMI, BveI | GC | M.CmaLM2I, M.CpaYL7II, M.Pat19335II, | | | | |
| | | M.PbaVA2I, M.Pdi9689I | | | | |
| Acc36I, BfuAI, | ACCT | M.Cmu51329I, M.EcoJA03PDcm, | CCWGG | 1, 5 | Unknown | ACCTGCCWGG[NNNN] |
| BspMI, BveI | GC | M.RorR1Dcm, M.Sen8391Dcm, M.ZalSM2II | | | | |
| Acc36I, BfuAI, | ACCT | M.CocI, M.Fli6794II, M.HincII, M.HindII, | GTYRAC | 2, 5 | m6A | GTYRACCTGCNNNN[NNNN] |
| BspMI, BveI | GC | M.HinHia1II | | | | |
| Acc36I, BfuAI, | ACCT | M.CocIII, M.Fsi4947II, M.TdeIII, | GGNCC | 1, 5 | m4C | GGACCTGCNNNN[NNNN] |
| BspMI, BveI | GC | M.Tph12270I | | | | |
| Acc36I, BfuAI, | ACCT | M.CpeAVI, M.TcoKWC4I | GTATAC | 2, 5 | m6A | GTATACCTGCNNNN[NNNN] |
| BspMI, BveI | GC | | | | | |
| Acc36I, BfuAI, | ACCT | M.CsiFSMII, M.MfoCT6IV, M.NgoAIV, | GCCGGC | 2, 5 | m5C | ACCTGCCGGC[NNNN] |
| BspMI, BveI | GC | M.NgoMIV, M1.Sgr13350II | | | | |
| Acc36I, BfuAI, | ACCT | M.CviQI, M.Hpy32XII, M.Hpy57XI, | GTAC | 2, 3 | m6A | GTACCTGCNNNN[NNNN] |
| BspMI, BveI | GC | M.Hpy66XII, M.Hpy99XII, M.HpyFXII, | | | | |
| | | M.HpyPIV, M.HpyUM037XI, M.PabI | | | | |
| Acc36I, BfuAI, | ACCT | M.CviQIII, M.CviSIII, M.Hpy299XI, | TCGA | 1, 4 | m6A | TCGACCTGCNNNN[NNNN] |
| BspMI, BveI | GC | M.Hpy30II, M.Hpy32X, M.Hpy99VII, | | | | |
| | | M.HpyAX, M.HpyFII, M.HpyUM032XVII, | | | | |
| | | M.Tam77409III, M.TaqI, M.TpaRLI, | | | | |
| | | M.Tth HB8I | | | | |
| Acc36I, BfuAI, | ACCT | M.CviRI, M.Hpy298VIII, M.Hpy299VIII, | TGCA | 1, 4 | m6A | TGCACCTGCNNNN[NNNN], |
| BspMI, BveI | GC | M.Hpy30VI, M.Hpy32V, M.Hpy57II, | | | | ACCTGCANNN[NNNN] |
| | | M.Hpy66VIII, M.HpyFVI, M.HpyUM032VIII, | | | | |
| | | M.HpyUM037VIII | | | | |
| Acc36I, BfuAI, | ACCT | M.Dac11109II, M.Hfo6591I, M.MhuII, | GTAC | 1, 4 | m4C | GTACCTGCNNNN[NNNN] |
| BspMI, BveI | GC | M.MjaV, M.MlaZII, M.MspLW5I, M.RsaI | | | | |
| Acc36I, BfuAI, | ACCT | M.DdeI | CTNAG | 1, 5 | m5C | ACCTGCTNAG[NNNN] |
| BspMI, BveI | GC | | | | | |
| Acc36I, BfuAI, | ACCT | M.DfeI, M.Fnu419II, M.Pen113II | CTNNAG | 2, 5 | m6A | ACCTGCAGNN[NNNN] |
| BspMI, BveI | GC | | | | | |
| Acc36I, BfuAI, | ACCT | M.EcoO109I | RGGNCCY | 3, 5 | m5C | RGGACCTGCNNNN[NNNN] |
| BspMI, BveI | GC | | | | | |
| Acc36I, BfuAI, | ACCT | M.Esp1396I | CCANNNN | 3, 9 | m6A | CCACCTGCTGGN[NNNN] |
| BspMI, BveI | GC | | NTGG | | | |
| Acc36I, BfuAI, | ACCT | M.FatI | CATG | 1, 4 | m5C | ACCTGCATGN[NNNN] |
| BspMI, BveI | GC | | | | | |
| Acc36I, BfuAI, | ACCT | M.FisAW1I, M.ThaI, M.Tph12270II | CGCG | 1, 4 | m4C | ACCTGCGCGN[NNNN] |
| BspMI, BveI | GC | | | | | |
| Acc36I, BfuAI, | ACCT | M.FnoB1II, M.Hal24586I, M.Hpy298V, | CCGG | 1, 4 | m4C | ACCTGCCGGN[NNNN] |
| BspMI, BveI | GC | M.Hpy299IX, M.Hpy30V, M.Hpy32XI, | | | | |
| | | M.Hpy57V, M.Hpy66IX, M.Hpy99VIII, | | | | |
| | | M.HpyFV, M.HpyUM032IX, M.HpyUM037IX, | | | | |
| | | M.MjaVI, M.PspJDRI, M.TmeBII | | | | |
| Acc36I, BfuAI, | ACCT | M.HgiCI | GGYRCC | 2, 5 | m5C | GGYACCTGCNNNN[NNNN] |
| BspMI, BveI | GC | | | | | |
| Acc36I, BfuAI, | ACCT | M.HhaI, M.HinP1I, M.Hpy99III, M.HpyAVIII, | GCGC | 2, 3 | m5C | ACCTGCGCNN[NNNN] |
| BspMI, BveI | GC | M.HpyUM032XV | | | | |
| Acc36I, BfuAI, | ACCT | M.Hme33500II | HGCWGCK | 3 | m4C | ACCTGCWGCK[NNNN] |
| BspMI, BveI | GC | | | | | |
| Acc36I, BfuAI, | ACCT | M.HpaI, M.Mwh3033I, M.Rsp7I | GTTAAC | 2, 5 | m6A | GTTAACCTGCNNNN[NNNN] |
| BspMI, BveI | GC | | | | | |
| Acc36I, BfuAI, | ACCT | M.Hpy188I, M.Hpy298IX, M.Hpy299V, | TCNGA | 1, 5 | m6A | TCNGACCTGCNNNN[NNNN] |
| BspMI, BveI | GC | M.Hpy66V, M.HpyUM032V | | | | |
| Acc36I, BfuAI, | ACCT | M.Hpy30IX, M.Hpy32IX, M.Hpy57IX, | GTNNAC | 2, 5 | m6A | GTNNACCTGCNNNN[NNNN] |
| BspMI, BveI | GC | M.Hpy66XIII, M.Hpy8I, M.HpyFIX, | | | | |
| | | M.HpyUM032XI, M.HpyUM037V, M.MjaIV, | | | | |
| | | M.MspRAC08II | | | | |
| Acc36I, BfuAI, | ACCT | M.Hpy30VIII, M.Hpy32VIII, M.Hpy57III, | TCNNGA | 1, 6 | m6A | TCNNGACCTGCNNNN[NNNN] |
| BspMI, BveI | GC | M.Hpy66VI, M.Hpy99XVIII, M.HpyFVIII, | | | | |
| | | M.HpyPVIII | | | | |
| Acc36I, BfuAI, | ACCT | M.Hpy30X, M.Hpy57VIII, M.HpyFXI, M.MhuI | CTNAG | 1, 5 | m4C | ACCTGCTNAG[NNNN] |
| BspMI, BveI | GC | | | | | |
| Acc36I, BfuAI, | ACCT | M.Hpy57X | CTRYAG | 2, 5 | m6A | ACCTGCAGNN[NNNN] |
| BspMI, BveI | GC | | | | | |
| Acc36I, BfuAI, | ACCT | M.Hpy99II, M.Tsp45I, M.Tsu2489II | GTSAC | 2, 4 | m6A | GTSACCTGCNNNN[NNNN] |
| BspMI, BveI | GC | | | | | |
| Acc36I, BfuAI, | ACCT | M.HpyD27I | CCTC | 1, 3 | m5C, | ACCTGCCTCN[NNNN] |
| BspMI, BveI | GC | | | | m6A | |
| Acc36I, BfuAI, | ACCT | M.Lph145I, M.Lph93I | GGWGA | 5 | m6A | GGWGACCTGCNNNN[NNNN] |
| BspMI, BveI | GC | | | | | |
| Acc36I, BfuAI, | ACCT | M.Mae7806III, M.PspPI, M.Sau96I | GGNCC | 2, 4 | m5C | GGACCTGCNNNN[NNNN] |
| BspMI, BveI | GC | | | | | |
| Acc36I, BfuAI, | ACCT | M.MjaII | GGNCC | 1, 5 | m5C | GGACCTGCNNNN[NNNN] |
| BspMI, BveI | GC | | | | | |
| Acc36I, BfuAI, | ACCT | M.Msp1II | CCTGG | 1 | m4C | ACCTGCCTGG[NNNN] |
| BspMI, BveI | GC | | | | | |
| Acc36I, BfuAI, | ACCT | M.Msp42II | CCWGG | 1, 5 | m4C | ACCTGCCWGG[NNNN] |
| BspMI, BveI | GC | | | | | |
| Acc36I, BfuAI, | ACCT | M.NgoAXV, M.NgoMV | GGNNCC | 2, 5 | m5C | GGNACCTGCNNNN[NNNN] |
| BspMI, BveI | GC | | | | | |
| Acc36I, BfuAI, | ACCT | M.NheI | GCTAGC | 1, 6 | m4C | ACCTGCTAGC[NNNN] |
| BspMI, BveI | GC | | | | | |
| Acc36I, BfuAI, | ACCT | M.Nme18V | GCGCGC | 2, 5 | m5C | ACCTGCGCGC[NNNN] |
| BspMI, BveI | GC | | | | | |
| Acc36I, BfuAI, | ACCT | M.NmeDI | VCCGGY | 2, 5 | m5C | ACCTGCCGGB[NNNN] |
| BspMI, BveI | GC | | | | | |
| Acc36I, BfuAI, | ACCT | M.NmeMC58III | CCAGA | 1 | m5C | ACCTGCCAGA[NNNN] |
| BspMI, BveI | GC | | | | | |
| Acc36I, BfuAI, | ACCT | M.NspI, M.NspHI | RCATGY | 2, 5 | m5C | ACCTGCATGY [NNNN] |
| BspMI, BveI | GC | | | | | |
| Acc36I, BfuAI, | ACCT | M.Pla5I | CTAG | 1, 4 | Unknown | ACCTGCTAGN[NNNN] |
| BspMI, BveI | GC | | | | | |
| Acc36I, BfuAI, | ACCT | M.SmoLVI, M.Spn23FII, M.Spn556I, | TCTAGA | 1, 6 | m6A | TCTAGACCTGCNNNN[NNNN] |
| BspMI, BveI | GC | M.Spn7465I, M.SpnRI, M.XbaI | | | | |
| Acc36I, BfuAI, | ACCT | M.SonIII | GACNNNN | 2, 8 | m6A | GACCTGCTGCN[NNNN], |
| BspMI, BveI | GC | | TGC | | | GACNACCTGCNNNN[NNNN] |
| Acc36I, BfuAI, | ACCT | M.TspRI | CASTG | 1, 5 | m5C | ACCTGCASTG[NNNN] |
| BspMI, BveI | GC | | | | | |
| Acc36I, BfuAI, | ACCT | M.Yen2516I | GCGCGC | 2, 5 | Unknown | ACCTGCGCGC[NNNN] |
| BspMI, BveI | GC | | | | | |
| Acc36I, BfuAI, | ACCT | M1.AgoG2I, M2.AgoG2I | CCAGT | 1, 4 | m4C | ACCTGCCAGT[NNNN] |
| BspMI, BveI | GC | | | | | |
| Acc36I, BfuAI, | ACCT | M1.BspACI | CCGC | 1 | m5C | ACCTGCCGCN[NNNN] |
| BspMI, BveI | GC | | | | | |
| Acc36I, BfuAI, | ACCT | M1.Eco31I, M1.EcoMI | GAGACC | 4 | m6A | GAGACCTGCNNNN[NNNN] |
| BspMI, BveI | GC | | | | | |
| Acc36I, BfuAI, | ACCT | M1.HgaI, M2.LlaJI | GCGTC | 2 | m5C | ACCTGCGTCN[NNNN] |
| BspMI, BveI | GC | | | | | |
| Acc36I, BfuAI, | ACCT | M1.Hpy32II | GRRGA | 5 | m6A | GRRGACCTGCNNNN[NNNN] |
| BspMI, BveI | GC | | | | | |
| Acc36I, BfuAI, | ACCT | M1.HpyAII, M1.MboII, M1.NcuI | GAAGA | 5 | m6A | GAAGACCTGCNNNN[NNNN] |
| BspMI, BveI | GC | | | | | |
| Acc36I, BfuAI, | ACCT | M1.LplAG30I | CCTTC | 1 | m5C | ACCTGCCTTC[NNNN] |
| BspMI, BveI | GC | | | | | |
| Acc36I, BfuAI, | ACCT | M2.BceSIII, M1.Pru9I, M2.Pru9I | GCCGT | 2, 4 | m4C | ACCTGCCGTN[NNNN] |
| BspMI, BveI | GC | | | | | |
| Acc36I, BfuAI, | ACCT | M2.ClaSBI, M1.Fli6794IV, M2.HphI, | GGTGA | 5 | m6A | GGTGACCTGCNNNN[NNNN] |
| BspMI, BveI | GC | M2.Ngo3502II, M1.Ngo6140II, M1.NgoAXVI, | | | | |
| | | M1.NgoBVIII, M1.NgoFA19I, M2.NgoMVIII, | | | | |
| | | M2.PspHUN102I, M1.Ssp10II | | | | |
| Acc36I, BfuAI, | ACCT | M2.HpyAVI, M1.MnlI | CCTC | 1 | m5C | ACCTGCCTCN[NNNN] |
| BspMI, BveI | GC | | | | | |
| Acc36I, BfuAI, | ACCT | M2.RspA76I | GGGAC | 4 | m6A | GGGACCTGCNNNN[NNNN] |
| BspMI, BveI | GC | | | | | |
| AceIII | CAGC | M.AbaBs12I, M.Awo1030I, M.Cdu23823I, | CCWGG | 1, 5 | m5C | CAGCTCCWGGNNN[NNNN] |
| | TC | M.Csa8155II, M.Cun9529I, M.EasL1Dcm, | | | | |
| | | M.Eba57Dcm, M.Ec134399Dcm, | | | | |
| | | M.Eco12761Dcm M.Eco3609Dcm, | | | | |
| | | M.Eco4255Dcm, M.EcoVR50Dcm, | | | | |
| | | M.EsaSP1II, M.Kpn34618Dcm, | | | | |
| | | M.Kpn38547Dcm, M.Kpn39I, M.Kpn43816I, | | | | |
| | | M.Kpn677ORFDcm, M.Kpn928Dcm, | | | | |
| | | M.KpnNIH1Dcm, M.KpnNIH10Dcm, | | | | |
| | | M.KpnNIH30Dcm, M.Kva120Dcm, M.Lsp48I, | | | | |
| | | M.Pmi1I, M.SpaD2III, M.SplRp8II, | | | | |
| | | M.SptADcm, M.Tsu2489III | | | | |
| AceIII | CAGC | M.Acc65VI, M.SenAZIII | CTKMAG | 2, 5 | m6A | CTKCAGCTCNNNNNNN[NNNN] |
| | TC | | | | | |
| AceIII | CAGC | M.AciI | CCGC | 1, 3 | m5C | CAGCTCCGCNNNN[NNNN] |
| | TC | | | | | |
| AceIII | CAGC | M.Ade56712I, M.Asp588III, M.AveCB51II, | CTGCAG | 2, 5 | m6A | CTGCAGCTCNNNNNNN[NNNN] |
| | TC | M.BbrUIII, M.Blo30698I, M.BsuBI, | | | | |
| | | M.CpaYL7III, M.Dba7044I, M.Dfa45958II, | | | | |
| | | M.Eco12581I, M.Eco2012I, M.EcoGIII, | | | | |
| | | M.EcoG089I, M.Eho16691II, M.Hal5920II, | | | | |
| | | M.Lsp6406II, M.MspNR41II, M.Pae490I, | | | | |
| | | M.Pox23570I, M.PstI, M.RpaII, M.Sca3403II, | | | | |
| | | M.Tsp61I, M.XmnII, M.YenWI, M.YinY228I | | | | |
| AceIII | CAGC | M.Ama55I, M.CnaPQ2III, M.Rmo1926II, | CGGCCG | 1, 6 | m5C | CAGCTCGGCCGNN[NNNN] |
| | TC | M.SenC1765IV, M.SspG1I, M.XorPXII | | | | |
| AceIII | CAGC | M.AplI | CTGCAG | 3, 4 | m5C | CTGCAGCTCNNNNNNN[NNNN] |
| | TC | | | | | |
| AceIII | CAGC | M.AquI | CYCGRG | 1, 6 | m5C | CAGCTCGRGNNNN[NNNN], |
| | TC | | | | | CAGCTCYCGRGNN[NNNN] |
| AceIII | CAGC | M.Asp588II, M.BstVI, M.Dsp964I, M.DvuII, | CTCGAG | 2, 5 | m6A | CAGCTCGAGNNNN[NNNN] |
| | TC | M.GsuRed1II, M.Hka19301II, M.Mch9957IV, | | | | |
| | | M.MfoCT6II, M.Mhy14884I, M.Mru1279II, | | | | |
| | | M.MsmI, M.Msm8159I, M.Nal45188I, | | | | |
| | | M.Osp807I, M.Pae63I, M.PaeR7I, M.XhoI | | | | |
| AceIII | CAGC | M.AvaV, M.SliSI | GATC | 1, 4 | m4C | GATCAGCTCNNNNNNN[NNNN] |
| | TC | | | | | |
| AceIII | CAGC | M.BamWS8I, M.CthV, M.EfaRFI, M.Saf8902II, | GCWGC | 2, 4 | m5C | GCAGCTCNNNNNNN[NNNN] |
| | TC | M.TacII, M.TcoKWC4III | | | | |
| AceIII | CAGC | M.BbvI, M.BceSIV | GCAGC | 2, 4 | m5C | GCAGCTCNNNNNNN[NNNN] |
| | TC | | | | | |
| AceIII | CAGC | M.BceSII | GGWCC | 1, 5 | m5C | GGWCCAGCTCNNNNNNN[NNNN] |
| | TC | | | | | |
| AceIII | CAGC | M.BcoSlacII, M.MspLW5III, M.Nbr128I, | CTCGAG | 1, 6 | m4C | CAGCTCGAGNNNN[NNNN], |
| | TC | M.Psy18884II, M.Tam77409II, M.TbrGE1II, | | | | CAGCTCTCGAGNN[NNNN] |
| | | M.TpaRLII | | | | |
| AceIII | CAGC | M.BepI, M.FpsJV, M.Gel16401III, M.Pdi8503I | CGCG | 1, 4 | m5C | CAGCTCGCGNNNN[NNNN] |
| | TC | | | | | |
| AceIII | CAGC | M.BsoBI | CYCGRG | 1, 6 | m4C | CAGCTCGRGNNNN[NNNN], |
| | TC | | | | | CAGCTCYCGRGNN[NNNN] |
| AceIII | CAGC | M.Bsp14III, M.Bsp3003I, M.Bsp3004I, | GATC | 1, 4 | m5C | GATCAGCTCNNNNNNN[NNNN] |
| | TC | M.CalB3III, M.CpeAIII, M.Esu35585I, | | | | |
| | | M.FpsJIV, M.Lba2031I, M.Lbo2004I, | | | | |
| | | M.LlaKR2I, M.Lmo1042I, M.Lmo7956II, | | | | |
| | | M.Lsp10393II, M.MspI7I, M.Sau3AI, M.Sba3I, | | | | |
| | | M.Sin395I, M.Spn23FI, M.Sth368I | | | | |
| AceIII | CAGC | M.BstXI | CCANNNN | 3, 10 | m6A | CCAGCTCNNTGGNN[NNNN] |
| | TC | | NNTGG | | | |
| AceIII | CAGC | M.BsuFI, M.CpeAIV, M.MspI | CCGG | 1, 4 | m5C | CAGCTCCGGNNNN[NNNN] |
| | TC | | | | | |
| AceIII | CAGC | M.Cab13497I, M.Dac11109III, M.Dco13527I, | CTAG | 1, 4 | m4C | CAGCTCTAGNNNN[NNNN] |
| | TC | M.Djo10085I, M.Hbo11551I, M.Hka19301III, | | | | |
| | | M.Hme33500I, M.HsaR1I, M.Hsi33800I, | | | | |
| | | M.HspKM1WII, M.HspNII, M.HtuI, M.HvoDSI, | | | | |
| | | M.Lba2029II, M.Mbo45II, M.MjaI, M.MthZI, | | | | |
| | | M.Nas12278I, M.Rfl3010I, M.SsmMI | | | | |
| AceIII | CAGC | M.Cac8I | GCNNGC | 2, 5 | m5C | GCCAGCTCNNNNNNN[NNNN], |
| | TC | | | | | CAGCTCGCNNNNN[NNNN] |
| AceIII | CAGC | M.CagVI | TCCGGA | 1, 6 | m6A | CAGCTCCGGANNN[NNNN] |
| | TC | | | | | |
| AceIII | CAGC | M.Cdi630IV, M.Ckr177III, M.CmaLM2II, | GCNGC | 2, 4 | m5C | GCAGCTCNNNNNNN[NNNN] |
| | TC | M.CocII, M.Fnu4HI, M.Fsp4HI | | | | |
| AceIII | CAGC | M.CfrBI, M.Sen1735IV, M.SenAnaIV | CCWWGG | 1, 6 | m4C | CAGCTCCWWGGNN[NNNN] |
| | TC | | | | | |
| AceIII | CAGC | M.Cmu51329I, M.EcoJA03PDcm, | CCWGG | 1, 5 | Unknown | CAGCTCCWGGNNN[NNNN] |
| | TC | M.RorR1Dcm, M.Sen8391Dcm, M.ZalSM2II | | | | |
| AceIII | CAGC | M.CocIII, M.Fsi4947II, M.TdeIII, | GGNCC | 1, 5 | m4C | GGNCCAGCTCNNNNNNN[NNNN] |
| | TC | M.Tph12270I | | | | |
| AceIII | CAGC | M.Cph17I, M.Cph41I | CTYCAG | 5 | m6A | CTYCAGCTCNNNNNNN[NNNN] |
| | TC | | | | | |
| AceIII | CAGC | M.CviQIII, M.CviSIII, M.Hpy299XI, | TCGA | 1, 4 | m6A | CAGCTCGANNNNN[NNNN] |
| | TC | M.Hpy30II, M.Hpy32X, M.Hpy99VII, | | | | |
| | | M.HpyAX, M.HpyFII, M.HpyUM032XVII, | | | | |
| | | M.Tam77409III, M.TaqI, M.TpaRLI, | | | | |
| | | M.TthHB8I | | | | |
| AceIII | CAGC | M.CviRI, M.Hpy298VIII, M.Hpy299VIII, | TGCA | 1, 4 | m6A | TGCAGCTCNNNNNNN[NNNN] |
| | TC | M.Hpy30VI, M.Hpy32V, M.Hpy57II, | | | | |
| | | M.Hpy66VIII, M.HpyFVI, M.HpyUM032VIII, | | | | |
| | | M.HpyUM037VIII | | | | |
| AceIII | CAGC | M.Dac11109II, M.Hfo6591I, M.MhuII, | GTAC | 1, 4 | m4C | GTACAGCTCNNNNNNN[NNNN] |
| | TC | M.MjaV, M.MlaZII, M.MspLW5I, M.RsaI | | | | |
| AceIII | CAGC | M.DdeI | CTNAG | 1, 5 | m5C | CTCAGCTCNNNNNNN[NNNN], |
| | TC | | | | | CAGCTCAGNNNNN[NNNN], |
| | | | | | | CAGCTCTNAGNNN[NNNN] |
| AceIII | CAGC | M.DfeI, M.Fnu419II, M.Pen113II | CTNNAG | 2, 5 | m6A | CTNCAGCTCNNNNNNN[NNNN], |
| | TC | | | | | CAGCTCNAGNNNN[NNNN] |
| AceIII | CAGC | M.Esp1396I | CCANNNN | 3, 9 | m6A | CCAGCTCNTGGNNN[NNNN] |
| | TC | | NTGG | | | |
| AceIII | CAGC | M.FatI | CATG | 1, 4 | m5C | CAGCTCATGNNNN[NNNN] |
| | TC | | | | | |
| AceIII | CAGC | M.FisAW1I, M.ThaI, M.Tph12270II | CGCG | 1, 4 | m4C | CAGCTCGCGNNNN[NNNN] |
| | TC | | | | | |
| AceIII | CAGC | M.FnoB1II, M.Hal24586I, M.Hpy298V, | CCGG | 1, 4 | m4C | CAGCTCCGGNNNN[NNNN] |
| | TC | M.Hpy299IX, M.Hpy30V, M.Hpy32XI, | | | | |
| | | M.Hpy57V, M.Hpy66IX, M.Hpy99VIII, | | | | |
| | | M.HpyFV, M.HpyUM032IX, M.HpyUM037IX, | | | | |
| | | M.MjaVI, M.PspJDRI, M.TmeBII | | | | |
| AceIII | CAGC | M.Gel16401IV | CCAG | 2 | m5C | CCAGCTCNNNNNNN[NNNN] |
| | TC | | | | | |
| AceIII | CAGC | M.Hka19301IV | TCGCGA | 2, 5 | m4C | CAGCTCGCGANNN[NNNN] |
| | TC | | | | | |
| AceIII | CAGC | M.Hme33500II | HGCWGCK | 3 | m4C | HGCAGCTCNNNNNNN[NNNN] |
| | TC | | | | | |
| AceIII | CAGC | M.Hpy188I, M.Hpy298IX, M.Hpy299V, | TCNGA | 1, 5 | m6A | CAGCTCNGANNNN[NNNN] |
| | TC | M.Hpy66V, M.HpyUM032V | | | | |
| AceIII | CAGC | M.Hpy30VIII, M.Hpy32VIII, M.Hpy57III, | TCNNGA | 1, 6 | m6A | CAGCTCNNGANNN[NNNN] |
| | TC | M.Hpy66VI, M.Hpy99XVIII, M.HpyFVIII, | | | | |
| | | M.HpyPVIII | | | | |
| AceIII | CAGC | M.Hpy30X, M.Hpy57VIII, M.HpyFXI, M.MhuI | CTNAG | 1, 5 | m4C | CTCAGCTCNNNNNNN[NNNN], |
| | TC | | | | | CAGCTCAGNNNNN[NNNN], |
| | | | | | | CAGCTCTNAGNNN[NNNN] |
| AceIII | CAGC | M.Hpy57X | CTRYAG | 2, 5 | m6A | CTRCAGCTCNNNNNNN[NNNN] |
| | TC | | | | | |
| AceIII | CAGC | M.Hpy99IV, M.HpyFORFX | CCNNGG | 1, 6 | m4C | CAGCTCCNNGGNN[NNNN] |
| | TC | | | | | |
| AceIII | CAGC | M.HpyD27I | CCTC | 1, 3 | m5C, | CAGCTCCTCNNNN[NNNN] |
| | TC | | | | m6A | |
| AceIII | CAGC | M.Kpn555II, M.Mha183III | CTTCAG | 2, 5 | m6A | CTTCAGCTCNNNNNNN[NNNN] |
| | TC | | | | | |
| AceIII | CAGC | M.Lph145I, M.Lph93I | TCWCC | 1 | m6A | CAGCTCWCCNNNN[NNNN] |
| | TC | | | | | |
| AceIII | CAGC | M.Lph145II, M.Lph93II | CYAG | 3 | m6A | CCAGCTCNNNNNNN[NNNN] |
| | TC | | | | | |
| AceIII | CAGC | M.Lph15I | CCAG | 3 | m6A | CCAGCTCNNNNNNN[NNNN] |
| | TC | | | | | |
| AceIII | CAGC | M.Maf25III, M.Mbo26III, M.Mbo30III, | CTCCAG | 2, 5 | m6A | CTCCAGCTCNNNNNNN[NNNN], |
| | TC | M.MboBCG21I, M.MkaDI, M.Mtu22103III, | | | | CAGCTCCAGNNNN[NNNN] |
| | | M.Mtu22115II, M.Mtu26105II, M.Mtu28I, | | | | |
| | | M.Mtu37004II, M.MtuF1I, M.MtuHIII, | | | | |
| | | M.MtuJKIII | | | | |
| AceIII | CAGC | M.MjaII | GGNCC | 1, 5 | m5C | GGNCCAGCTCNNNNNNN[NNNN] |
| | TC | | | | | |
| AceIII | CAGC | M.Msp1II | CCTGG | 1 | m4C | CAGCTCCTGGNNN[NNNN] |
| | TC | | | | | |
| AceIII | CAGC | M.Msp42II | CCWGG | 1, 5 | m4C | CAGCTCCWGGNNN[NNNN] |
| | TC | | | | | |
| AceIII | CAGC | M.NheI | GCTAGC | 1, 6 | m4C | GCTAGCAGCTCNNNNNNN[NNNN] |
| | TC | | | | | |
| AceIII | CAGC | M.Nme18III | TCTGG | 2, 4 | m5C | CAGCTCTGGNNNN[NNNN] |
| | TC | | | | | |
| AceIII | CAGC | M.NmeMC58III | CCAGA | 1 | m5C | CAGCTCCAGANNN[NNNN] |
| | TC | | | | | |
| AceIII | CAGC | M.Nsp209III, M.Nsp51109II | CTCGAG | 1, 6 | m5C | CAGCTCGAGNNNN[NNNN], |
| | TC | | | | | CAGCTCTCGAGNN[NNNN] |
| AceIII | CAGC | M.Pam7686I | CCATGG | 1, 6 | m5C | CAGCTCCATGGNN[NNNN] |
| | TC | | | | | |
| AceIII | CAGC | M.Pfa23572II | CGATCG | 1, 6 | m5C | CAGCTCGATCGNN[NNNN] |
| | TC | | | | | |
| AceIII | CAGC | M.Pla5I | CTAG | 1, 4 | Unknown | CAGCTCTAGNNNN[NNNN] |
| | TC | | | | | |
| AceIII | CAGC | M.RpaIV | CTCGAG | 3, 4 | m5C | CAGCTCGAGNNNN[NNNN] |
| | TC | | | | | |
| AceIII | CAGC | M.Sam53668II | CCATGG | 1, 6 | Unknown | CAGCTCCATGGNN[NNNN] |
| | TC | | | | | |
| AceIII | CAGC | M.Sen1781III | CCWWGG | 1, 6 | Unknown | CAGCTCCWWGGNN[NNNN] |
| | TC | | | | | |
| AceIII | CAGC | M.SmoLVI, M.Spn23FII, M.Spn556I, | TCTAGA | 1, 6 | m6A | CAGCTCTAGANNN[NNNN] |
| | TC | M.Spn7465I, M.SpnRI, M.XbaI | | | | |
| AceIII | CAGC | M.SonIII | GCANNNN | 3, 9 | m6A | GCAGCTCGTCNNNN[NNNN] |
| | TC | | GTC | | | |
| AceIII | CAGC | M.TdeII | CTCTTC | 1, 2 | m4C, | CAGCTCTTCNNNN[NNNN], |
| | TC | | | | m6A | CAGCTCTCTTCNN[NNNN] |
| AceIII | CAGC | M.TspRI | CASTG | 1, 5 | m5C | CAGCTCASTGNNN[NNNN] |
| | TC | | | | | |
| AceIII | CAGC | M1.AgoG2I, M2.AgoG2I | CCAGT | 1, 4 | m4C | CAGCTCCAGTNNN[NNNN] |
| | TC | | | | | |
| AceIII | CAGC | M1.BspACI | CCGC | 1 | m5C | CAGCTCCGCNNNN[NNNN] |
| | TC | | | | | |
| AceIII | CAGC | M1.HphI | TCACC | 2 | m5C | CAGCTCACCNNNN[NNNN] |
| | TC | | | | | |
| AceIII | CAGC | M1.Hpy32II | TCYYC | 1 | m6A | CAGCTCYYCNNNN[NNNN] |
| | TC | | | | | |
| AceIII | CAGC | M1.HpyAII, M1.MboII, M1.NcuI | TCTTC | 1 | m6A | CAGCTCTTCNNNN[NNNN] |
| | TC | | | | | |
| AceIII | CAGC | M1.LplAG30I | CCTTC | 1 | m5C | CAGCTCCTTCNNN[NNNN] |
| | TC | | | | | |
| AceIII | CAGC | M1.Sgr13350III, M2.Sgr13350III | GCTCTTC | 2, 3 | m4C, | CAGCTCTTCNNNN[NNNN] |
| | TC | | | | m6A | |
| AceIII | CAGC | M2.ClaSBI, M1.Fli6794IV, M2.HphI, | TCACC | 1 | m6A | CAGCTCACCNNNN[NNNN] |
| | TC | M2.Ngo3502II, M1.Ngo6140II, M1.NgoAXVI, | | | | |
| | | M1.NgoBVIII, M1.NgoFA19I, M2.NgoMVIII, | | | | |
| | | M2.PspHUN102I, M1.Ssp10II | | | | |
| AceIII | CAGC | M2.Hpy32II, M2.HpyAII, M2.MboII, M2.NcuI | TCTTC | 2 | m4C | CAGCTCTTCNNNN[NNNN] |
| | TC | | | | | |
| AceIII | CAGC | M2.HpyAVI, M1.MnlI | CCTC | 1 | m5C | CAGCTCCTCNNNN[NNNN] |
| | TC | | | | | |
| Bbr7I | GAAG | M.AatII, M.Lsp6406III | GACGTC | 2, 5 | m6A | GAAGACGTCNNNN[NNNN] |
| | AC | | | | | |
| Bbr7I | GAAG | M.AbaBs12I, M.Awo1030I, M.Cdu23823I, | CCWGG | 1, 5 | m5C | CCWGGAAGACNNNNNNN[NNNN], |
| | AC | M.Csa8155II, M.Cun9529I, M.EasL1Dcm, | | | | GAAGACCWGGNNN[NNNN] |
| | | M.Eba57Dcm, M.Ecl34399Dcm, | | | | |
| | | M.Eco12761Dcm, M.Eco3609Dcm, | | | | |
| | | M.Eco4255Dcm, M.EcoVR50Dcm, | | | | |
| | | M.EsaSP1II, M.Kpn34618Dcm, | | | | |
| | | M.Kpn38547Dcm, M.Kpn39I, M.Kpn43816I, | | | | |
| | | M.Kpn677ORFDcm, M.Kpn928Dcm, | | | | |
| | | M.KpnNIH1Dcm, M.KpnNIH10Dcm, | | | | |
| | | M.KpnNIH30Dcm, M.Kva120Dcm, M.Lsp48I, | | | | |
| | | M.Pmi1I, M.SpaD2III, M.SplRp8II, | | | | |
| | | M.SptADcm, M.Tsu2489III | | | | |
| Bbr7I | GAAG | M.AbrSp7I, M.Apa101655II, M.Ath21654I, | GANTC | 2, 4 | m6A | GAAGACTCNNNNN[NNNN] |
| | AC | M.BdiNK6I, M.Bel76I, M.Bsp460I, | | | | |
| | | M.BspJKG1II, M.BspLA1II, M.BspRAC04II, | | | | |
| | | M.CagII, M.CcrMI, M.CcrNAI, M.CnaPQ2I, | | | | |
| | | M.Csp16704III, M.CspNS6I, M.CviBI, | | | | |
| | | M.CviQVI, M.Eli8509I, M.Fnu419I, M.Fsp71I, | | | | |
| | | M.HbaI, M.HhaII, M.HinfI, M.HinHia1I, | | | | |
| | | M.Hpy298IV, M.Hpy299IV, M.Hpy 32IV, | | | | |
| | | M.Hpy57IV, M.Hpy66IV, M.Hpy99IX, | | | | |
| | | M.HpyAIV, M.HpyFIV, M.HpyUM032IV, | | | | |
| | | M.HpyUM037IV, M.Mbo45III, M.Msp10I, | | | | |
| | | M.Msp73BI, M.MspAL11I, M.MspLW5II, | | | | |
| | | M.NhaXII, M.NpeUS61I, M.OspHL35I, | | | | |
| | | M.Pin17395II, M.Pla5III, M.PspLM6I, | | | | |
| | | M.RbaNRL2I, M.Rgi145II, M.Rmo1926I, | | | | |
| | | M.RpaIII, M.RsaII, M.RshIII, M.Rsp8I, | | | | |
| | | M.SmeC3I, M.SmoLV, M.Sna24252I, | | | | |
| | | M.SscL1I, M.SspM41II, M.SstE37II, M.ThaIII, | | | | |
| | | M.Xsp91I, M.ZmoCP4I | | | | |
| Bbr7I | GAAG | M.Acc65VI, M.SenAZIII | CTKMAG | 2, 5 | m6A | CTGAAGACNNNNNNN[NNNN] |
| | AC | | | | | |
| Bbr7I | GAAG | M.AciI | CCGC | 1, 3 | m5C | GCGGAAGACNNNNNNN[NNNN], |
| | AC | | | | | GAAGACCGCNNNN[NNNN] |
| Bbr7I | GAAG | M.AflIII | ACRYGT | 2, 5 | m4C | GAAGACRYGTNNN[NNNN] |
| | AC | | | | | |
| Bbr7I | GAAG | M.AgsI | TTSAA | 1, 5 | m6A | TTGAAGACNNNNNNN[NNNN] |
| | AC | | | | | |
| Bbr7I | GAAG | M.Ama55I, M.CnaPQ2III, M.Rmo1926II, | CGGCCG | 1, 6 | m5C | CGGCCGAAGACNNNNNNN[NNNN], |
| | AC | M.SenC1765IV, M.SspG1I, M.XorPXII | | | | GAAGACGGCCGNN[NNNN] |
| Bbr7I | GAAG | M.AquI | CYCGRG | 1, 6 | m5C | CYCGRGAAGACNNNNNNN[NNNN], |
| | AC | | | | | GAAGACYCGRGNN[NNNN] |
| Bbr7I | GAAG | M.AvaIX, M.Cfr10I, M.Nme18VI, M.VchAI, | RCCGGY | 2, 5 | m5C | GAAGACCGGYNNN[NNNN] |
| | AC | M.Vch0395I | | | | |
| Bbr7I | GAAG | M.BcoSlacII, M.MspLW5III, M.Nbr128I, | CTCGAG | 1, 6 | m4C | CTCGAGAAGACNNNNNNN[NNNN], |
| | AC | M.Psy18884II, M.Tam77409II, M.TbrGE1II, | | | | GAAGACTCGAGNN[NNNN] |
| | | M.TpaRLII | | | | |
| Bbr7I | GAAG | M.BepI, M.FpsJV, M.Gel16401III, M.Pdi8503I | CGCG | 1, 4 | m5C | CGCGAAGACNNNNNNN[NNNN], |
| | AC | | | | | GAAGACGCGNNNN[NNNN] |
| Bbr7I | GAAG | M.BsoBI | CYCGRG | 1, 6 | m4C | CYCGRGAAGACNNNNNNN[NNNN], |
| | AC | | | | | GAAGACYCGRGNN[NNNN] |
| Bbr7I | GAAG | M.BsuFI, M.CpeAIV, M.MspI | CCGG | 1, 4 | m5C | CCGGAAGACNNNNNNN[NNNN], |
| | AC | | | | | GAAGACCGGNNNN[NNNN] |
| Bbr7I | GAAG | M.Cab13497I, M.Dac11109III, M.Dco13527I, | CTAG | 1, 4 | m4C | CTAGAAGACNNNNNNN[NNNN], |
| | AC | M.Djo10085I, M.Hbo11551I, M.Hka19301III, | | | | GAAGACTAGNNNN[NNNN] |
| | | M.Hme33500I, M.HsaR1I, M.Hsi33800I, | | | | |
| | | M.HspKM1WII, M.HspNII, M.HtuI, M.HvoDSI, | | | | |
| | | M.Lba2029II, M.Mbo45II, M.MjaI, M.MthZI, | | | | |
| | | M.Nas12278I, M.Rfl3010I, M.SsmMI | | | | |
| Bbr7I | GAAG | M.CagV, M.Lsp6406I, M.Rsp7740I, | TTCGAA | 1, 6 | m6A | TTCGAAGACNNNNNNN[NNNN] |
| | AC | M.RspPBTS2II, M.VbaLP2AI | | | | |
| Bbr7I | GAAG | M.CagVI | TCCGGA | 1, 6 | m6A | TCCGGAAGACNNNNNNN[NNNN] |
| | AC | | | | | |
| Bbr7I | GAAG | M.CagVIII | ACGCGT | 2, 5 | m4C | GAAGACGCGTNNN[NNNN] |
| | AC | | | | | |
| Bbr7I | GAAG | M.CfrBI, M.Sen1735IV, M.SenAnaIV | CCWWGG | 1, 6 | m4C | CCWWGGAAGACNNNNNNN[NNNN], |
| | AC | | | | | GAAGACCWWGGNN[NNNN] |
| Bbr7I | GAAG | M.Cmu51329I, M.EcoJA03PDcm, | CCWGG | 1, 5 | Unknown | CCWGGAAGACNNNNNNN[NNNN], |
| | AC | M.RorR1Dcm, M.Sen8391Dcm, M.ZalSM2II | | | | GAAGACCWGGNNN[NNNN] |
| Bbr7I | GAAG | M.CviQIII, M.CviSIII, M.Hpy299XI, | TCGA | 1, 4 | m6A | TCGAAGACNNNNNNN[NNNN] |
| | AC | M.Hpy30II, M.Hpy32X, M.Hpy99VII, | | | | |
| | | M.HpyAX, M.HpyFII, M.HpyUM032XVII, | | | | |
| | | M.Tam77409III, M.TaqI, M.TpaRLI, | | | | |
| | | M.TthHB8I | | | | |
| Bbr7I | GAAG | M.DdeI | CTNAG | 1, 5 | m5C | CTNAGAAGACNNNNNNN[NNNN], |
| | AC | | | | | GAAGACTNAGNNN[NNNN] |
| Bbr7I | GAAG | M.DfeI, M.Fnu419II, M.Pen113II | CTNNAG | 2, 5 | m6A | CTGAAGACNNNNNNN[NNNN] |
| | AC | | | | | |
| Bbr7I | GAAG | M.FatI | CATG | 1, 4 | m5C | CATGAAGACNNNNNNN[NNNN], |
| | AC | | | | | GAAGACATGNNNN[NNNN] |
| Bbr7I | GAAG | M.FisAW1I, M.ThaI, M.Tph12270II | CGCG | 1, 4 | m4C | CGCGAAGACNNNNNNN[NNNN], |
| | AC | | | | | GAAGACGCGNNNN[NNNN] |
| Bbr71 | GAAG | M.FnoB1II, M.Hal24586I, M.Hpy298V, | CCGG | 1, 4 | m4C | CCGGAAGACNNNNNNN[NNNN], |
| | AC | M.Hpy299IX, M.Hpy30V, M.Hpy32XI, | | | | GAAGACCGGNNNN[NNNN] |
| | | M.Hpy57V, M.Hpy66IX, M.Hpy99VIII, | | | | |
| | | M.HpyFV, M.HpyUM032IX, M.HpyUM037IX, | | | | |
| | | M.MjaVI, M.PspJDRI, M.TmeBII | | | | |
| Bbr7I | GAAG | M.FpsJIII | CTGAAG | 5 | m6A | CTGAAGACNNNNNNN[NNNN] |
| | AC | | | | | |
| Bbr7I | GAAG | M.GsuRed1IV, M.Osp807II, M.Tth111I | GACNNNG | 2, 8 | m6A | GAAGACNNNGTCN[NNNN] |
| | AC | | TC | | | |
| Bbr7I | GAAG | M.Hka19301IV | TCGCGA | 2, 5 | m4C | TCGCGAAGACNNNNNNN[NNNN] |
| | AC | | | | | |
| Bbr7I | GAAG | M.Hpy188I, M.Hpy298IX, M.Hpy299V, | TCNGA | 1, 5 | m6A | TCNGAAGACNNNNNNN[NNNN] |
| | AC | M.Hpy66V, M.HpyUM032V | | | | |
| Bbr7I | GAAG | M.Hpy298II, M.Hpy299II, M.Hpy66II, | ACNGT | 2, 4 | m4C | GAAGACNGTNNNN[NNNN] |
| | AC | M.HpyUM032II, M.HpyUM037II | | | | |
| Bbr7I | GAAG | M.Hpy30VIII, M.Hpy32VIII, M.Hpy57III, | TCNNGA | 1, 6 | m6A | TCNNGAAGACNNNNNNN[NNNN] |
| | AC | M.Hpy66VI, M.Hpy99XVIII, M.HpyFVIII, | | | | |
| | | M.HpyPVIII | | | | |
| Bbr7I | GAAG | M.Hpy30X, M.Hpy57VIII, M.HpyFXI, M.MhuI | CTNAG | 1, 5 | m4C | CTNAGAAGACNNNNNNN[NNNN], |
| | AC | | | | | GAAGACTNAGNNN[NNNN] |
| Bbr7I | GAAG | M.Hpy99IV, M.HpyFORFX | CCNNGG | 1, 6 | m4C | CCNNGGAAGACNNNNNNN[NNNN], |
| | AC | | | | | GAAGACCNNGGNN[NNNN] |
| Bbr7I | GAAG | M.Hpy99XI | ACGT | 2, 3 | m5C | GAAGACGTNNNNN[NNNN] |
| | AC | | | | | |
| Bbr7I | GAAG | M.HpyD27I | GAGG | 2, 4 | m6A, | GAAGACCTCNNNN[NNNN], |
| | AC | | | | m5C | GAGGAAGACNNNNNNN[NNNN] |
| Bbr7I | GAAG | M.Kpn555II, M.Mha183III | CTGAAG | 2, 5 | m6A | CTGAAGACNNNNNNN[NNNN] |
| | AC | | | | | |
| Bbr7I | GAAG | M.Lph145I, M.Lph93I | GGWGA | 5 | m6A | GGWGAAGACNNNNNNN[NNNN] |
| | AC | | | | | |
| Bbr7I | GAAG | M.MlyI, M.Pen113I | GASTC | 2, 4 | m6A | GAAGACTCNNNNN[NNNN] |
| | AC | | | | | |
| Bbr7I | GAAG | M.Msp1II | CCAGG | 5 | m4C | GAAGACCTGGNNN[NNNN], |
| | AC | | | | | CCAGGAAGACNNNNNNN[NNNN] |
| Bbr7I | GAAG | M.Msp42II | CCWGG | 1, 5 | m4C | CCWGGAAGACNNNNNNN[NNNN], |
| | AC | | | | | GAAGACCWGGNNN[NNNN] |
| Bbr7I | GAAG | M.Nme18III | CCAGA | 2, 4 | m5C | CCAGAAGACNNNNNNN[NNNN] |
| | AC | | | | | |
| Bbr7I | GAAG | M.NmeDI | VCCGGY | 2, 5 | m5C | GAAGACCGGBNNN[NNNN] |
| | AC | | | | | |
| Bbr7I | GAAG | M.NmeMC58III | CCAGA | 1 | m5C | TCTGGAAGACNNNNNNN[NNNN], |
| | AC | | | | | GAAGACCAGANNN[NNNN] |
| Bbr7I | GAAG | M.Nsp209III, M.Nsp51109II | CTCGAG | 1, 6 | m5C | CTCGAGAAGACNNNNNNN[NNNN], |
| | AC | | | | | GAAGACTCGAGNN[NNNN] |
| Bbr7I | GAAG | M.NspI, M.NspHI | RCATGY | 2, 5 | m5C | GAAGACATGYNNN[NNNN] |
| | AC | | | | | |
| Bbr7I | GAAG | M.Pam7686I | CCATGG | 1, 6 | m5C | CCATGGAAGACNNNNNNN[NNNN], |
| | AC | | | | | GAAGACCATGGNN[NNNN] |
| Bbr7I | GAAG | M.Pfa23572II | CGATCG | 1, 6 | m5C | CGATCGAAGACNNNNNNN[NNNN], |
| | AC | | | | | GAAGACGATCGNN[NNNN] |
| Bbr7I | GAAG | M.Pla5I | CTAG | 1, 4 | Unknown | CTAGAAGACNNNNNNN[NNNN], |
| | AC | | | | | GAAGACTAGNNNN[NNNN] |
| Bbr7I | GAAG | M.Sam53668II | CCATGG | 1, 6 | Unknown | CCATGGAAGACNNNNNNN[NNNN], |
| | AC | | | | | GAAGACCATGGNN[NNNN] |
| Bbr7I | GAAG | M.Sen1781III | CCWWGG | 1, 6 | Unknown | CCWWGGAAGACNNNNNNN[NNNN], |
| | AC | | | | | GAAGACCWWGGNN[NNNN] |
| Bbr7I | GAAG | M.SmoLVI, M.Spn23FII, M.Spn556I, | TCTAGA | 1, 6 | m6A | TCTAGAAGACNNNNNNN[NNNN] |
| | AC | M.Spn7465I, M.SpnRI, M.XbaI | | | | |
| Bbr7I | GAAG | M.SonIII | GACNNNN | 2, 8 | m6A | GAAGACNNNNTGC[NNNN] |
| | AC | | TGC | | | |
| Bbr7I | GAAG | M.TdeII | CTCTTC | 1, 2 | m4C, | GAAGAGAAGACNNNNNNN[NNNN], |
| | AC | | | | m6A | GAAGACTCTTCNN[NNNN] |
| Bbr7I | GAAG | M.TspRI | CASTG | 1, 5 | m5C | CASTGAAGACNNNNNNN[NNNN], |
| | AC | | | | | GAAGACASTGNNN[NNNN] |
| Bbr7I | GAAG | M.XmnI | GAANNNN | 2, 9 | m6A | GAAGACNTTCNNN[NNNN] |
| | AC | | TTC | | | |
| Bbr7I | GAAG | M1.AgoG2I, M2.AgoG2I | CCAGT | 1, 4 | m4C | ACTGGAAGACNNNNNNN[NNNN], |
| | AC | | | | | GAAGACTGGNNNN[NNNN], |
| | | | | | | GAAGACCAGTNNN[NNNN] |
| Bbr7I | GAAG | M1.BceSIII | ACGGC | 2 | m4C | GAAGACGGCNNNN[NNNN] |
| | AC | | | | | |
| Bbr7I | GAAG | M1.BspACI | CCGC | 1 | m5C | GCGGAAGACNNNNNNN[NNNN], |
| | AC | | | | | GAAGACCGCNNNN[NNNN] |
| Bbr7I | GAAG | M1.Dsh12II, M2.Dsh12II | GACGGC | 3, 4 | m4C | GAAGACGGCNNNN[NNNN] |
| | AC | | | | | |
| Bbr7I | GAAG | M1.HphI | GGTGA | 4 | m5C | GGTGAAGACNNNNNNN[NNNN] |
| | AC | | | | | |
| Bbr7I | GAAG | M1.LplAG30I | GAAGG | 5 | m5C | GAAGACCTTCNNN[NNNN], |
| | AC | | | | | GAAGGAAGACNNNNNNN[NNNN] |
| Bbr7I | GAAG | M2.BceSIII, M1.Pru9I, M2.Pru9I | ACGGC | 2, 4 | m4C | GAAGACGGCNNNN[NNNN] |
| | AC | | | | | |
| Bbr7I | GAAG | M2.BfiI | ACTGGG | 2 | m4C | GAAGACTGGGNNN[NNNN] |
| | AC | | | | | |
| Bbr7I | GAAG | M2.BfuAI | ACCTGC | 2 | m5C | GAAGACCTGCNNN[NNNN] |
| | AC | | | | | |
| Bbr71 | GAAG | M2.ClaSBI, M1.Fli6794IV, M2.HphI, | GGTGA | 5 | m6A | GGTGAAGACNNNNNNN[NNNN] |
| | AC | M2.Ngo3502II, M1.Ngo6140II, M1.NgoAXVI, | | | | |
| | | M1.NgoBVIII, M1.NgoFA19I, M2.NgoMVIII, | | | | |
| | | M2.PspHUN102I, M1.Ssp10II | | | | |
| Bbr7I | GAAG | M2.HgaI, M1.LlaJI | GACGC | 3 | m5C | GAAGACGCNNNNN[NNNN] |
| | AC | | | | | |
| Bbr7I | GAAG | M2.HpyAVI, M1.MnlI | GAGG | 4 | m5C | GAAGACCTCNNNN[NNNN], |
| | AC | | | | | GAGGAAGACNNNNNNN[NNNN] |
| Bbr7I | GAAG | M2.Nme579IV, M2.NmeMC58II | GACGC | 2 | m6A | GAAGACGCNNNNN[NNNN] |
| | AC | | | | | |
| BbsI, BbvII, | GAAG | M.AbaBs12I, M.Awo1030I, M.Cdu23823I, | CCWGG | 1, 5 | m5C | CCWGGAAGACNN[NNNN] |
| Bbv16II, BpiI, | AC | M.Csa8155II, M.Cun9529I, M.EasL1Dcm, | | | | |
| BpuAI, Bsc91I, | | M.Eba57Dcm, M.Ecl34399Dcm, | | | | |
| BspBS31I, | | M.Eco12761Dcm, M.Eco3609Dcm, | | | | |
| BspIS4I, | | M.Eco4255Dcm, M.EcoVR50Dcm, | | | | |
| BspTS514I, | | M.EsaSP1II, M.Kpn34618Dcm, | | | | |
| BstBS32I, BstTS5I, | | M.Kpn38547Dcm, M.Kpn39I, M.Kpn43816I, | | | | |
| BstV2I | | M.Kpn677ORFDcm, M.Kpn928Dcm, | | | | |
| | | M.KpnNIH1Dcm, M.KpnNIH10Dcm, | | | | |
| | | M.KpnNIH30Dcm, M.Kva120Dcm, M.Lsp48I, | | | | |
| | | M.Pmi1I, M.SpaD2III, M.SplRp8II, | | | | |
| | | M.SptADcm, M.Tsu2489III | | | | |
| BbsI, BbvII, | GAAG | M.AbrSp7I, M.Apa101655II, M.Ath21654I, | GANTC | 2, 4 | m6A | GAAGACTC[NNNN] |
| Bbv16II, BpiI, | AC | M.BdiNK6I, M.Bel76I, M.Bsp460I, | | | | |
| BpuAI, Bsc91I, | | M.BspJKG1II, M.BspLA1II, M.BspRAC04II, | | | | |
| BspBS31I, | | M.CagII, M.CcrMI, M.CcrNAI, M.CnaPQ2I, | | | | |
| BspIS4I, | | M.Csp16704III, M.CspNS6I, M.CviBI, | | | | |
| BspTS514I, | | M.CviQVI, M.Eli8509I, M.Fnu419I, M.Fsp71I, | | | | |
| BstBS32I, BstTS5I, | | M.HbaI, M.HhaII, M.HinfI, M.HinHia1I, | | | | |
| BstV2I | | M.Hpy298IV, M.Hpy299IV, M.Hpy32IV, | | | | |
| | | M.Hpy57IV, M.Hpy66IV, M.Hpy99IX, | | | | |
| | | M.HpyAIV, M.HpyFIV, M.HpyUM032IV, | | | | |
| | | M.HpyUM037IV, M.Mbo45III, M.Msp10I, | | | | |
| | | M.Msp73BI, M.MspAL11I, M.MspLW5II, | | | | |
| | | M.NhaXII, M.NpeUS61I, M.OspHL35I, | | | | |
| | | M.Pin17395II, M.Pla5III, M.PspLM6I, | | | | |
| | | M.RbaNRL2I, M.Rgi145II, M.Rmo1926I, | | | | |
| | | M.RpaIII, M.RsaII, M.RshIII, M.Rsp8I, | | | | |
| | | M.SmeC3I, M.SmoLV, M.Sna24252I, | | | | |
| | | M.SscL1I, M.SspM41II, M.SstE37II, M.ThaIII, | | | | |
| | | M.Xsp91I, M.ZmoCP4I | | | | |
| BbsI, BbvII, | GAAG | M.Acc65VI, M.SenAZIII | CTKMAG | 2, 5 | m6A | CTGAAGACNN[NNNN] |
| Bbv16II, BpiI, | AC | | | | | |
| BpuAI, Bsc91I, | | | | | | |
| BspBS31I, | | | | | | |
| BspIS4I, | | | | | | |
| BspTS514I, | | | | | | |
| BstBS32I, BstTS5I, | | | | | | |
| BstV2I | | | | | | |
| BbsI, BbvII, | GAAG | M.AciI | GCGG | 2, 4 | m5C | GCGGAAGACNN[NNNN] |
| Bbv16II, BpiI, | AC | | | | | |
| BpuAI, Bsc91I, | | | | | | |
| BspBS31I, | | | | | | |
| BspIS4I, | | | | | | |
| BspTS514I, | | | | | | |
| BstBS32I, BstTS5I, | | | | | | |
| BstV2I | | | | | | |
| BbsI, BbvII, | GAAG | M.AgsI | TTSAA | 1, 5 | m6A | TTGAAGACNN[NNNN] |
| Bbv16II, BpiI, | AC | | | | | |
| BpuAI, Bsc91I, | | | | | | |
| BspBS31I, | | | | | | |
| BspIS4I, | | | | | | |
| BspTS514I, | | | | | | |
| BstBS32I, BstTS5I, | | | | | | |
| BstV2I | | | | | | |
| BbsI, BbvII, | GAAG | M.Ama55I, M.CnaPQ2III, M.Rmo1926II, | CGGCCG | 1, 6 | m5C | CGGCCGAAGACNN[NNNN] |
| Bbv16II, BpiI, | AC | M.SenC1765IV, M.SspG1I, M.XorPXII | | | | |
| BpuAI, Bsc91I, | | | | | | |
| BspBS31I, | | | | | | |
| BspIS4I, | | | | | | |
| BspTS514I, | | | | | | |
| BstBS32I, BstTS5I, | | | | | | |
| BstV2I | | | | | | |
| BbsI, BbvII, | GAAG | M.AquI | CYCGRG | 1, 6 | m5C | CYCGRGAAGACNN[NNNN] |
| Bbv16II, BpiI, | AC | | | | | |
| BpuAI, Bsc91I, | | | | | | |
| BspBS31I, | | | | | | |
| BspIS4I, | | | | | | |
| BspTS514I, | | | | | | |
| BstBS32I, BstTS5I, | | | | | | |
| BstV2I | | | | | | |
| BbsI, BbvII, | GAAG | M.BcoSlacII, M.MspLW5III, M.Nbr128I, | CTCGAG | 1, 6 | m4C | CTCGAGAAGACNN[NNNN] |
| Bbv16II, BpiI, | AC | M.Psy18884II, M.Tam77409II, M.TbrGE1II, | | | | |
| BpuAI, Bsc91I, | | M.TpaRLII | | | | |
| BspBS31I, | | | | | | |
| BspIS4I, | | | | | | |
| BspTS514I, | | | | | | |
| BstBS32I, BstTS5I, | | | | | | |
| BstV2I | | | | | | |
| BbsI, BbvII, | GAAG | M.BepI, M.FpsJV, M.Gel16401III, M.Pdi8503I | CGCG | 1, 4 | m5C | CGCGAAGACNN[NNNN] |
| Bbv16II, BpiI, | AC | | | | | |
| BpuAI, Bsc91I, | | | | | | |
| BspBS31I, | | | | | | |
| BspIS4I, | | | | | | |
| BspTS514I, | | | | | | |
| BstBS32I, BstTS5I, | | | | | | |
| BstV2I | | | | | | |
| BbsI, BbvII, | GAAG | M.BsoBI | CYCGRG | 1, 6 | m4C | CYCGRGAAGACNN[NNNN] |
| Bbv16II, BpiI, | AC | | | | | |
| BpuAI, Bsc91I, | | | | | | |
| BspBS31I, | | | | | | |
| BspIS4I, | | | | | | |
| BspTS514I, | | | | | | |
| BstBS32I, BstTS5I, | | | | | | |
| BstV2I | | | | | | |
| BbsI, BbvII, | GAAG | M.BsuFI, M.CpeAIV, M.MspI | CCGG | 1, 4 | m5C | CCGGAAGACNN[NNNN] |
| Bbv16II, BpiI, | AC | | | | | |
| BpuAI, Bsc91I, | | | | | | |
| BspBS31I, | | | | | | |
| BspIS4I, | | | | | | |
| BspTS514I, | | | | | | |
| BstBS32I, BstTS5I, | | | | | | |
| BstV2I | | | | | | |
| BbsI, BbvII, | GAAG | M.Cab13497I, M.Dac11109III, M.Dco13527I, | CTAG | 1, 4 | m4C | CTAGAAGACNN[NNNN] |
| Bbv16II, BpiI, | AC | M.Djo10085I, M.Hbo11551I, M.Hka19301III, | | | | |
| BpuAI, Bsc91I, | | M.Hme33500I, M.HsaR1I, M.Hsi33800I, | | | | |
| BspBS31I, | | M.HspKM1WII, M.HspNII, M.HtuI, M.HvoDSI, | | | | |
| BspIS4I, | | M.Lba2029II, M.Mbo45II, M.MjaI, M.MthZI, | | | | |
| BspTS514I, | | M.Nas12278I, M.Rfl3010I, M.SsmMI | | | | |
| BstBS32I, BstTS5I, | | | | | | |
| BstV2I | | | | | | |
| BbsI, BbvII, | GAAG | M.CagV, M.Lsp6406I, M.Rsp7740I, | TTCGAA | 1, 6 | m6A | TTCGAAGACNN[NNNN] |
| Bbv16II, BpiI, | AC | M.RspPBTS2II, M.VbaLP2AI | | | | |
| BpuAI, Bsc91I, | | | | | | |
| BspBS31I, | | | | | | |
| BspIS4I, | | | | | | |
| BspTS514I, | | | | | | |
| BstBS32I, BstTS5I, | | | | | | |
| BstV2I | | | | | | |
| BbsI, BbvII, | GAAG | M.CagVI | TCCGGA | 1, 6 | m6A | TCCGGAAGACNN[NNNN] |
| Bbv16II, BpiI, | AC | | | | | |
| BpuAI, Bsc91I, | | | | | | |
| BspBS31I, | | | | | | |
| BspIS4I, | | | | | | |
| BspTS514I, | | | | | | |
| BstBS32I, BstTS5I, | | | | | | |
| BstV2I | | | | | | |
| BbsI, BbvII, | GAAG | M.CfrBI, M.Sen1735IV, M.SenAnaIV | CCWWGG | 1, 6 | m4C | CCWWGGAAGACNN[NNNN] |
| Bbv16II, BpiI, | AC | | | | | |
| BpuAI, Bsc91I, | | | | | | |
| BspBS31I, | | | | | | |
| BspIS4I, | | | | | | |
| BspTS514I, | | | | | | |
| BstBS32I, BstTS5I, | | | | | | |
| BstV2I | | | | | | |
| BbsI, BbvII, | GAAG | M.Cmu51329I, M.EcoJA03PDcm, | CCWGG | 1, 5 | Unknown | CCWGGAAGACNN[NNNN] |
| Bbv16II, BpiI, | AC | M.RorR1Dcm, M.Sen8391Dcm, M.ZalSM2II | | | | |
| BpuAI, Bsc91I, | | | | | | |
| BspBS31I, | | | | | | |
| BspIS4I, | | | | | | |
| BspTS514I, | | | | | | |
| BstBS32I, BstTS5I, | | | | | | |
| BstV2I | | | | | | |
| BbsI, BbvII, | GAAG | M.CviQIII, M.CviSIII, M.Hpy299XI, | TCGA | 1, 4 | m6A | TCGAAGACNN[NNNN] |
| Bbv16II, BpiI, | AC | M.Hpy30II, M.Hpy32X, M.Hpy99VII, | | | | |
| BpuAI, Bsc91I, | | M.HpyAX, M.HpyFII, M.HpyUM032XVII, | | | | |
| BspBS31I, | | M.Tam77409III, M.TaqI, M.TpaRLI, | | | | |
| BspIS4I, | | M.TthHB8I | | | | |
| BspTS514I, | | | | | | |
| BstBS32I, BstTS5I, | | | | | | |
| BstV2I | | | | | | |
| BbsI, BbvII, | GAAG | M.DdeI | CTNAG | 1, 5 | m5C | CTNAGAAGACNN[NNNN] |
| Bbv16II, BpiI, | AC | | | | | |
| BpuAI, Bsc91I, | | | | | | |
| BspBS31I, | | | | | | |
| BspIS4I, | | | | | | |
| BspTS514I, | | | | | | |
| BstBS32I, BstTS5I, | | | | | | |
| BstV2I | | | | | | |
| BbsI, BbvII, | GAAG | M.DfeI, M.Fnu419II, M.Pen113II | CTNNAG | 2, 5 | m6A | CTGAAGACNN[NNNN] |
| Bbv16II, BpiI, | AC | | | | | |
| BpuAI, Bsc91I, | | | | | | |
| BspBS31I, | | | | | | |
| BspIS4I, | | | | | | |
| BspTS514I, | | | | | | |
| BstBS32I, BstTS5I, | | | | | | |
| BstV2I | | | | | | |
| BbsI, BbvII, | GAAG | M.FatI | CATG | 1, 4 | m5C | CATGAAGACNN[NNNN] |
| Bbv16II, BpiI, | AC | | | | | |
| BpuAI, Bsc91I, | | | | | | |
| BspBS31I, | | | | | | |
| BspIS4I, | | | | | | |
| BspTS514I, | | | | | | |
| BstBS32I, BstTS5I, | | | | | | |
| BstV2I | | | | | | |
| BbsI, BbvII, | GAAG | M.FisAW1I, M.ThaI, M.Tph12270II | CGCG | 1, 4 | m4C | CGCGAAGACNN[NNNN] |
| Bbv16II, BpiI, | AC | | | | | |
| BpuAI, Bsc91I, | | | | | | |
| BspBS31I, | | | | | | |
| BspIS4I, | | | | | | |
| BspTS514I, | | | | | | |
| BstBS32I, BstTS5I, | | | | | | |
| BstV2I | | | | | | |
| BbsI, BbvII, | GAAG | M.FnoB1II, M.Hal24586I, M.Hpy298V, | CCGG | 1, 4 | m4C | CCGGAAGACNN[NNNN] |
| Bbv16II, BpiI, | AC | M.Hpy299IX, M.Hpy30V, M.Hpy32XI, | | | | |
| BpuAI, Bsc91I, | | M.Hpy57V, M.Hpy66IX, M.Hpy99VIII, | | | | |
| BspBS31I, | | M.HpyFV, M.HpyUM032IX, M.HpyUM037IX, | | | | |
| BspIS4I, | | M.MjaVI, M.PspJDRI, M.TmeBII | | | | |
| BspTS514I, | | | | | | |
| BstBS32I, BstTS5I, | | | | | | |
| BstV2I | | | | | | |
| BbsI, BbvII, | GAAG | M.FpsJIII | CTGAAG | 5 | m6A | CTGAAGACNN[NNNN] |
| Bbv16II, BpiI, | AC | | | | | |
| BpuAI, Bsc91I, | | | | | | |
| BspBS31I, | | | | | | |
| BspIS4I, | | | | | | |
| BspTS514I, | | | | | | |
| BstBS32I, BstTS5I, | | | | | | |
| BstV2I | | | | | | |
| BbsI, BbvII, | GAAG | M.Hka19301IV | TCGCGA | 2, 5 | m4C | TCGCGAAGACNN[NNNN] |
| Bbv16II, BpiI, | AC | | | | | |
| BpuAI, Bsc91I, | | | | | | |
| BspBS31I, | | | | | | |
| BspIS4I, | | | | | | |
| BspTS514I, | | | | | | |
| BstBS32I, BstTS5I, | | | | | | |
| BstV2I | | | | | | |
| BbsI, BbvII, | GAAG | M.Hpy188I, M.Hpy298IX, M.Hpy299V, | TCNGA | 1, 5 | m6A | TCNGAAGACNN[NNNN] |
| Bbv16II, BpiI, | AC | M.Hpy66V, M.HpyUM032V | | | | |
| BpuAI, Bsc91I, | | | | | | |
| BspBS31I, | | | | | | |
| BspIS4I, | | | | | | |
| BspTS514I, | | | | | | |
| BstBS32I, BstTS5I, | | | | | | |
| BstV2I | | | | | | |
| BbsI, BbvII, | GAAG | M.Hpy30VIII, M.Hpy32VIII, M.Hpy57III, | TCNNGA | 1, 6 | m6A | TCNNGAAGACNN[NNNN] |
| Bbv16II, BpiI, | AC | M.Hpy66VI, M.Hpy99XVIII, M.HpyFVIII, | | | | |
| BpuAI, Bsc91I, | | M.HpyPVIII | | | | |
| BspBS31I, | | | | | | |
| BspIS4I, | | | | | | |
| BspTS514I, | | | | | | |
| BstBS32I, BstTS5I, | | | | | | |
| BstV21 | | | | | | |
| BbsI, BbvII, | GAAG | M.Hpy30X, M.Hpy57VIII, M.HpyFXI, M.MhuI | CTNAG | 1, 5 | m4C | CTNAGAAGACNN[NNNN] |
| Bbv16II, BpiI, | AC | | | | | |
| BpuAI, Bsc91I, | | | | | | |
| BspBS31I, | | | | | | |
| BspIS4I, | | | | | | |
| BspTS514I, | | | | | | |
| BstBS32I, BstTS5I, | | | | | | |
| BstV2I | | | | | | |
| BbsI, BbvII, | GAAG | M.Hpy99IV, M.HpyFORFX | CCNNGG | 1, 6 | m4C | CCNNGGAAGACNN[NNNN] |
| Bbv16II, BpiI, | AC | | | | | |
| BpuAI, Bsc91I, | | | | | | |
| BspBS31I, | | | | | | |
| BspIS4I, | | | | | | |
| BspTS514I, | | | | | | |
| BstBS32I, BstTS5I, | | | | | | |
| BstV2I | | | | | | |
| BbsI, BbvII, | GAAG | M.Hpy99XI | ACGT | 2, 3 | m5C | GAAGACGT[NNNN] |
| Bbv16II, BpiI, | AC | | | | | |
| BpuAI, Bsc91I, | | | | | | |
| BspBS31I, | | | | | | |
| BspIS4I, | | | | | | |
| BspTS514I, | | | | | | |
| BstBS32I, BstTS5I, | | | | | | |
| BstV2I | | | | | | |
| BbsI, BbvII, | GAAG | M.HpyD27I | GAGG | 2, 4 | m6A, | GAGGAAGACNN[NNNN] |
| Bbv16II, BpiI, | AC | | | | m5C | |
| BpuAI, Bsc91I, | | | | | | |
| BspBS31I, | | | | | | |
| BspIS4I, | | | | | | |
| BspTS514I, | | | | | | |
| BstBS32I, BstTS5I, | | | | | | |
| BstV2I | | | | | | |
| BbsI, BbvII, | GAAG | M.Kpn555II, M.Mha183III | CTGAAG | 2, 5 | m6A | CTGAAGACNN[NNNN] |
| Bbv16II, BpiI, | AC | | | | | |
| BpuAI, Bsc91I, | | | | | | |
| BspBS31I, | | | | | | |
| BspIS4I, | | | | | | |
| BspTS514I, | | | | | | |
| BstBS32I, BstTS5I, | | | | | | |
| BstV2I | | | | | | |
| BbsI, BbvII, | GAAG | M.Lph145I, M.Lph93I | GGWGA | 5 | m6A | GGWGAAGACNN[NNNN] |
| Bbv16II, BpiI, | AC | | | | | |
| BpuAI, Bsc91I, | | | | | | |
| BspBS31I, | | | | | | |
| BspIS4I, | | | | | | |
| BspTS514I, | | | | | | |
| BstBS32I, BstTS5I, | | | | | | |
| BstV2I | | | | | | |
| BbsI, BbvII, | GAAG | M.MlyI, M.Pen113I | GASTC | 2, 4 | m6A | GAAGACTC[NNNN] |
| Bbv16II, BpiI, | AC | | | | | |
| BpuAI, Bsc91I, | | | | | | |
| BspBS31I, | | | | | | |
| BspIS4I, | | | | | | |
| BspTS514I, | | | | | | |
| BstBS32I, BstTS5I, | | | | | | |
| BstV2I | | | | | | |
| BbsI, BbvII, | GAAG | M.Msp1II | CCAGG | 5 | m4C | CCAGGAAGACNN[NNNN] |
| Bbv16II, BpiI, | AC | | | | | |
| BpuAI, Bsc91I, | | | | | | |
| BspBS31I, | | | | | | |
| BspIS4I, | | | | | | |
| BspTS514I, | | | | | | |
| BstBS32I, BstTS5I, | | | | | | |
| BstV2I | | | | | | |
| BbsI, BbvII, | GAAG | M.Msp42II | CCWGG | 1, 5 | m4C | CCWGGAAGACNN[NNNN] |
| Bbv16II, BpiI, | AC | | | | | |
| BpuAI, Bsc91I, | | | | | | |
| BspBS31I, | | | | | | |
| BspIS4I, | | | | | | |
| BspTS514I, | | | | | | |
| BstBS32I, BstTS5I, | | | | | | |
| BstV2I | | | | | | |
| BbsI, BbvII, | GAAG | M.Nme18III | CCAGA | 2, 4 | m5C | CCAGAAGACNN[NNNN] |
| Bbv16II, BpiI, | AC | | | | | |
| BpuAI, Bsc91I, | | | | | | |
| BspBS31I, | | | | | | |
| BspIS4I, | | | | | | |
| BspTS514I, | | | | | | |
| BstBS32I, BstTS5I, | | | | | | |
| BstV2I | | | | | | |
| BbsI, BbvII, | GAAG | M.NmeMC58III | TCTGG | 5 | m5C | TCTGGAAGACNN[NNNN] |
| Bbv16II, BpiI, | AC | | | | | |
| BpuAI, Bsc91I, | | | | | | |
| BspBS31I, | | | | | | |
| BspIS4I, | | | | | | |
| BspTS514I, | | | | | | |
| BstBS32I, BstTS5I, | | | | | | |
| BstV2I | | | | | | |
| BbsI, BbvII, | GAAG | M.Nsp209III, M.Nsp51109II | CTCGAG | 1, 6 | m5C | CTCGAGAAGACNN[NNNN] |
| Bbv16II, BpiI, | AC | | | | | |
| BpuAI, Bsc91I, | | | | | | |
| BspBS31I, | | | | | | |
| BspIS4I, | | | | | | |
| BspTS514I, | | | | | | |
| BstBS32I, BstTS5I, | | | | | | |
| BstV2I | | | | | | |
| BbsI, BbvII, | GAAG | M.Pam7686I | CCATGG | 1, 6 | m5C | CCATGGAAGACNN[NNNN] |
| Bbv16II, BpiI, | AC | | | | | |
| BpuAI, Bsc91I, | | | | | | |
| BspBS31I, | | | | | | |
| BspIS4I, | | | | | | |
| BspTS514I, | | | | | | |
| BstBS32I, BstTS5I, | | | | | | |
| BstV2I | | | | | | |
| BbsI, BbvII, | GAAG | M.Pfa23572II | CGATCG | 1, 6 | m5C | CGATCGAAGACNN[NNNN] |
| Bbv16II, BpiI, | AC | | | | | |
| BpuAI, Bsc91I, | | | | | | |
| BspBS31I, | | | | | | |
| BspIS4I, | | | | | | |
| BspTS514I, | | | | | | |
| BstBS32I, BstTS5I, | | | | | | |
| BstV2I | | | | | | |
| BbsI, BbvII, | GAAG | M.Pla5I | CTAG | 1, 4 | Unknown | CTAGAAGACNN[NNNN] |
| Bbv16II, BpiI, | AC | | | | | |
| BpuAI, Bsc91I, | | | | | | |
| BspBS31I, | | | | | | |
| BspIS4I, | | | | | | |
| BspTS514I, | | | | | | |
| BstBS32I, BstTS5I, | | | | | | |
| BstV2I | | | | | | |
| BbsI, BbvII, | GAAG | M.Sam53668II | CCATGG | 1, 6 | Unknown | CCATGGAAGACNN[NNNN] |
| Bbv16II, BpiI, | AC | | | | | |
| BpuAI, Bsc91I, | | | | | | |
| BspBS31I, | | | | | | |
| BspIS4I, | | | | | | |
| BspTS514I, | | | | | | |
| BstBS32I, BstTS5I, | | | | | | |
| BstV2I | | | | | | |
| BbsI, BbvII, | GAAG | M.Sen1781III | CCWWGG | 1, 6 | Unknown | CCWWGGAAGACNN[NNNN] |
| Bbv16II, BpiI, | AC | | | | | |
| BpuAI, Bsc91I, | | | | | | |
| BspBS31I, | | | | | | |
| BspIS4I, | | | | | | |
| BspTS514I, | | | | | | |
| BstBS32I, BstTS5I, | | | | | | |
| BstV2I | | | | | | |
| BbsI, BbvII, | GAAG | M.SmoLVI, M.Spn23FII, M.Spn556I, | TCTAGA | 1, 6 | m6A | TCTAGAAGACNN[NNNN] |
| Bbv16II, BpiI, | AC | M.Spn7465I, M.SpnRI, M.XbaI | | | | |
| BpuAI, Bsc91I, | | | | | | |
| BspBS31I, | | | | | | |
| BspIS4I, | | | | | | |
| BspTS514I, | | | | | | |
| BstBS32I, BstTS5I, | | | | | | |
| BstV2I | | | | | | |
| BbsI, BbvII, | GAAG | M.TdeII | GAAGAG | 5, 6 | m6A, | GAAGAGAAGACNN[NNNN] |
| Bbv16II, BpiI, | AC | | | | m4C | |
| BpuAI, Bsc91I, | | | | | | |
| BspBS31I, | | | | | | |
| BspIS4I, | | | | | | |
| BspTS514I, | | | | | | |
| BstBS32I, BstTS5I, | | | | | | |
| BstV2I | | | | | | |
| BbsI, BbvII, | GAAG | M.TspRI | CASTG | 1, 5 | m5C | CASTGAAGACNN[NNNN] |
| Bbv16II, BpiI, | AC | | | | | |
| BpuAI, Bsc91I, | | | | | | |
| BspBS31I, | | | | | | |
| BspIS4I, | | | | | | |
| BspTS514I, | | | | | | |
| BstBS32I, BstTS5I, | | | | | | |
| BstV21 | | | | | | |
| BbsI, BbvII, | GAAG | M1.AgoG2I, M2.AgoG2I | ACTGG | 2, 5 | m4C | ACTGGAAGACNN[NNNN] |
| Bbv16II, BpiI, | AC | | | | | |
| BpuAI, Bsc91I, | | | | | | |
| BspBS31I, | | | | | | |
| BspIS4I, | | | | | | |
| BspTS514I, | | | | | | |
| BstBS32I, BstTS5I, | | | | | | |
| BstV2I | | | | | | |
| BbsI, BbvII, | GAAG | M1.BspACI | GCGG | 4 | m5C | GCGGAAGACNN[NNNN] |
| Bbv16II, BpiI, | AC | | | | | |
| BpuAI, Bsc91I, | | | | | | |
| BspBS31I, | | | | | | |
| BspIS4I, | | | | | | |
| BspTS514I, | | | | | | |
| BstBS32I, BstTS5I, | | | | | | |
| BstV2I | | | | | | |
| BbsI, BbvII, | GAAG | M1.HphI | GGTGA | 4 | m5C | GGTGAAGACNN[NNNN] |
| Bbv16II, BpiI, | AC | | | | | |
| BpuAI, Bsc91I, | | | | | | |
| BspBS31I, | | | | | | |
| BspIS4I, | | | | | | |
| BspTS514I, | | | | | | |
| BstBS32I, BstTS5I, | | | | | | |
| BstV2I | | | | | | |
| BbsI, BbvII, | GAAG | M1.LplAG30I | GAAGG | 5 | m5C | GAAGGAAGACNN[NNNN] |
| Bbv16II, BpiI, | AC | | | | | |
| BpuAI, Bsc91I, | | | | | | |
| BspBS31I, | | | | | | |
| BspIS4I, | | | | | | |
| BspTS514I, | | | | | | |
| BstBS32I, BstTS5I, | | | | | | |
| BstV2I | | | | | | |
| BbsI, BbvII, | GAAG | M2.ClaSBI, M1.Fli6794IV, M2.HphI, | GGTGA | 5 | m6A | GGTGAAGACNN[NNNN] |
| Bbv16II, BpiI, | AC | M2.Ngo3502II, M1.Ngo6140II, M1.NgoAXVI, | | | | |
| BpuAI, Bsc91I, | | M1.NgoBVIII, M1.NgoFA19I, M2.NgoMVIII, | | | | |
| BspBS31I, | | M2.PspHUN102I, M1.Ssp10II | | | | |
| BspIS4I, | | | | | | |
| BspTS514I, | | | | | | |
| BstBS32I, BstTS5I, | | | | | | |
| BstV2I | | | | | | |
| BbsI, BbvII, | GAAG | M2.HgaI, M1.LlaJI | GACGC | 3 | m5C | GAAGACGC[NNNN] |
| Bbv16II, BpiI, | AC | | | | | |
| BpuAI, Bsc91I, | | | | | | |
| BspBS31I, | | | | | | |
| BspIS4I, | | | | | | |
| BspTS514I, | | | | | | |
| BstBS32I, BstTS5I, | | | | | | |
| BstV2I | | | | | | |
| BbsI, BbvII, | GAAG | M2.HpyAVI, M1.MnlI | GAGG | 4 | m5C | GAGGAAGACNN[NNNN] |
| Bbv16II, BpiI, | AC | | | | | |
| BpuAI, Bsc91I, | | | | | | |
| BspBS31I, | | | | | | |
| BspIS4I, | | | | | | |
| BspTS514I, | | | | | | |
| BstBS32I, BstTS5I, | | | | | | |
| BstV21 | | | | | | |
| BbsI, BbvII, | GAAG | M2.Nme579IV, M2.NmeMC58II | GACGC | 2 | m6A | GAAGACGC[NNNN] |
| Bbv16II, BpiI, | AC | | | | | |
| BpuAI, Bsc91I, | | | | | | |
| BspBS31I, | | | | | | |
| BspIS4I, | | | | | | |
| BspTS514I, | | | | | | |
| BstBS32I, BstTS5I, | | | | | | |
| BstV2I | | | | | | |
| Bco5I, Bco116I, | CTCTT | M.AbrSp7I, M.Apa101655II, M.Ath21654I, | GANTC | 2, 4 | m6A | GACTCTTCN[NNN] |
| BcoKI, BseZI, | C | M.BdiNK6I, M.Bel76I, M.Bsp460I, | | | | |
| Bst6I, Bsu6I, | | M.BspJKG1II, M.BspLA1II, M.BspRAC04II, | | | | |
| CatHI, Eam1104I, | | M.CagII, M.CcrMI, M.CcrNAI, M.CnaPQ2I, | | | | |
| EarI, Ksp632I | | M.Csp16704III, M.CspNS6I, M.CviBI, | | | | |
| | | M.CviQVI, M.Eli8509I, M.Fnu419I, M.Fsp71I, | | | | |
| | | M.HbaI, M.HhaII, M.HinfI, M.HinHia1I, | | | | |
| | | M.Hpy298IV, M.Hpy299IV, M.Hpy32IV, | | | | |
| | | M.Hpy57IV, M.Hpy66IV, M.Hpy99IX, | | | | |
| | | M.HpyAIV, M.HpyFIV, M.HpyUM032IV, | | | | |
| | | M.HpyUM037IV, M.Mbo45III, M.Msp10I, | | | | |
| | | M.Msp73BI, M.MspAL11I, M.MspLW5II, | | | | |
| | | M.NhaXII, M.NpeUS61I, M.OspHL35I, | | | | |
| | | M.Pin17395II, M.Pla5III, M.PspLM6I, | | | | |
| | | M.RbaNRL2I, M.Rgi145II, M.Rmo1926I, | | | | |
| | | M.RpaIII, M.RsaII, M.RshIII, M.Rsp8I, | | | | |
| | | M.SmeC3I, M.SmoLV, M.Sna24252I, | | | | |
| | | M.SscL1I, M.SspM41II, M.SstE37II, M.ThaIII, | | | | |
| | | M.Xsp91I, M.ZmoCP4I | | | | |
| Bco5I, Bco116I, | CTCTT | M.AluBI | AGCT | 1, 4 | m6A | AGCTCTTCN[NNN] |
| BcoKI, BseZI, | C | | | | | |
| Bst6I, Bsu6I, | | | | | | |
| CatHI, Eam1104I, | | | | | | |
| EarI, Ksp632I | | | | | | |
| Bco5I, Bco116I, | CTCTT | M.AluI, M.CspCY2I | AGCT | 2, 3 | m5C | AGCTCTTCN[NNN] |
| BcoKI, BseZI, | C | | | | | |
| Bst6I, Bsu6I, | | | | | | |
| CatHI, Eam1104I, | | | | | | |
| EarI, Ksp632I | | | | | | |
| Bco5I, Bco116I, | CTCTT | M.Alw26I | GTCTC | 3, 2 | m5C, | GTCTCTTCN[NNN] |
| BcoKI, BseZI, | C | | | | m6A | |
| Bst6I, Bsu6I, | | | | | | |
| CatHI, Eam1104I, | | | | | | |
| EarI, Ksp632I | | | | | | |
| Bco5I, Bco116I, | CTCTT | M.AspDUT2II, M.BstYI, M.CagIII, | RGATCY | 2, 5 | m4C | |
| BcoKI, BseZI, | C | M.Mpa1757V, M.Mru1279V, M.RsaIII, | | | | |
| Bst6I, Bsu6I, | | M.XhoII | | | | |
| CatHI, Eam1104I, | | | | | | |
| EarI, Ksp632I | | | | | | |
| Bco5I, Bco116I, | CTCTT | M.AspJHL3I, M2.Psp320WII | GAGCTC | 3, 4 | m4C | GAGCTCTTCN[NNN] |
| BcoKI, BseZI, | C | | | | | |
| Bst6I, Bsu6I, | | | | | | |
| CatHI, Eam1104I, | | | | | | |
| EarI, Ksp632I | | | | | | |
| Bco5I, Bco116I, | CTCTT | M.AvaV, M.SliSI | GATC | 1, 4 | m4C | GATCTCTTCN[NNN] |
| BcoKI, BseZI, | C | | | | | |
| Bst6I, Bsu6I, | | | | | | |
| CatHI, Eam1104I, | | | | | | |
| EarI, Ksp632I | | | | | | |
| Bco5I, Bco116I, | CTCTT | M.BanII, M.EcoT38I | GRGCYC | 3, 4 | m5C | GRGCTCTTCN[NNN] |
| BcoKI, BseZI, | C | | | | | |
| Bst6I, Bsu6I, | | | | | | |
| CatHI, Eam1104I, | | | | | | |
| EarI, Ksp632I | | | | | | |
| Bco5I, Bco116I, | CTCTT | M.BceSII | GGWCC | 1, 5 | m5C | GGWCCTCTTCN[NNN] |
| BcoKI, BseZI, | C | | | | | |
| Bst6I, Bsu6I, | | | | | | |
| CatHI, Eam1104I, | | | | | | |
| EarI, Ksp632I | | | | | | |
| Bco5I, Bco116I, | CTCTT | M.BglII | AGATCT | 2, 5 | m4C | AGATCTCTTCN [NNN] |
| BcoKI, BseZI, | C | | | | | |
| Bst6I, Bsu6I, | | | | | | |
| CatHI, Eam1104I, | | | | | | |
| EarI, Ksp632I | | | | | | |
| Bco5I, Bco116I, | CTCTT | M.Ble402III, M.Psp10HI | SAGCTS | 3, 4 | m4C | SAGCTCTTCN[NNN] |
| BcoKI, BseZI, | C | | | | | |
| Bst6I, Bsu6I, | | | | | | |
| CatHI, Eam1104I, | | | | | | |
| EarI, Ksp632I | | | | | | |
| Bco5I, Bco116I, | CTCTT | M.Bsp14III, M.Bsp3003I, M.Bsp3004I, | GATC | 1, 4 | m5C | GATCTCTTCN[NNN] |
| BcoKI, BseZI, | C | M.CalB3III, M.CpeAIII, M.Esu35585I, | | | | |
| Bst6I, Bsu6I, | | M.FpsJIV, M.Lba2031I, M.Lbo2004I, | | | | |
| CatHI, Eam1104I, | | M.LlaKR2I, M.Lmo1042I, M.Lmo7956II, | | | | |
| EarI, Ksp632I | | M.Lsp10393II, M.MspI7I, M.Sau3AI, M.Sba3I, | | | | |
| | | M.Sin395I, M.Spn23FI, M.Sth368I | | | | |
| Bco5I, Bco116I, | CTCTT | M.CocIII, M.Fsi4947II, M.TdeIII, | GGNCC | 1, 5 | m4C | GGNCCTCTTCN[NNN] |
| BcoKI, BseZI, | C | M.Tph12270I | | | | |
| Bst6I, Bsu6I, | | | | | | |
| CatHI, Eam1104I, | | | | | | |
| EarI, Ksp632I | | | | | | |
| Bco5I, Bco116I, | CTCTT | M.CviJI | RGCB | 2, 3 | m5C | VGCTCTTCN[NNN] |
| BcoKI, BseZI, | C | | | | | |
| Bst6I, Bsu6I, | | | | | | |
| CatHI, Eam1104I, | | | | | | |
| EarI, Ksp632I | | | | | | |
| Bco5I, Bco116I, | CTCTT | M.Dac11109II, M.Hfo6591I, M.MhuII, | GTAC | 1, 4 | m4C | GTACTCTTCN[NNN] |
| BcoKI, BseZI, | C | M.MjaV, M.MlaZII, M.MspLW5I, M.RsaI | | | | |
| Bst6I, Bsu6I, | | | | | | |
| CatHI, Eam1104I, | | | | | | |
| EarI, Ksp632I | | | | | | |
| Bco5I, Bco116I, | CTCTT | M.Esp3I | CGTCTC | 4, 3 | m5C, | CGTCTCTTCN[NNN] |
| BcoKI, BseZI, | C | | | | m6A | |
| Bst6I, Bsu6I, | | | | | | |
| CatHI, Eam1104I, | | | | | | |
| EarI, Ksp632I | | | | | | |
| Bco5I, Bco116I, | CTCTT | M.HpyD27I | CCTC | 1, 3 | m5C, | CCTCTTCN[NNN] |
| BcoKI, BseZI, | C | | | | m6A | |
| Bst6I, Bsu6I, | | | | | | |
| CatHI, Eam1104I, | | | | | | |
| EarI, Ksp6321 | | | | | | |
| Bco5I, Bco116I, | CTCTT | M.MjaII | GGNCC | 1, 5 | m5C | GGNCCTCTTCN[NNN] |
| BcoKI, BseZI, | C | | | | | |
| Bst6I, Bsu6I, | | | | | | |
| CatHI, Eam1104I, | | | | | | |
| EarI, Ksp632I | | | | | | |
| Bco5I, Bco116I, | CTCTT | M.MlyI, M.Pen113I | GASTC | 2, 4 | m6A | GACTCTTCN[NNN] |
| BcoKI, BseZI, | C | | | | | |
| Bst6I, Bsu6I, | | | | | | |
| CatHI, Eam1104I, | | | | | | |
| EarI, Ksp632I | | | | | | |
| Bco5I, Bco116I, | CTCTT | M.Mma5219II, M.TarMY3I | AGCT | 2, 3 | m4C | AGCTCTTCN[NNN] |
| BcoKI, BseZI, | C | | | | | |
| Bst6I, Bsu6I, | | | | | | |
| CatHI, Eam1104I, | | | | | | |
| EarI, Ksp632I | | | | | | |
| Bco5I, Bco116I, | CTCTT | M.MpeII | RGCY | 2, 3 | m5C | RGCTCTTCN[NNN] |
| BcoKI, BseZI, | C | | | | | |
| Bst6I, Bsu6I, | | | | | | |
| CatHI, Eam1104I, | | | | | | |
| EarI, Ksp632I | | | | | | |
| Bco5I, Bco116I, | CTCTT | M.NheI | GCTAGC | 1, 6 | m4C | GCTAGCTCTTCN[NNN] |
| BcoKI, BseZI, | C | | | | | |
| Bst6I, Bsu6I, | | | | | | |
| CatHI, Eam1104I, | | | | | | |
| EarI, Ksp632I | | | | | | |
| Bco5I, Bco116I, | CTCTT | M.Nme579III, M.NmeSI, M.ScaI, M.Ssp6714II | AGTACT | 2, 5 | m4C | AGTACTCTTCN[NNN] |
| BcoKI, BseZI, | C | | | | | |
| Bst6I, Bsu6I, | | | | | | |
| CatHI, Eam1104I, | | | | | | |
| EarI, Ksp632I | | | | | | |
| Bco5I, Bco116I, | CTCTT | M.Pae10332II, M1.Pae50071I, | CAGCTC | 3, 4 | m4C | CAGCTCTTCN[NNN] |
| BcoKI, BseZI, | C | M2.Pae50071I | | | | |
| Bst6I, Bsu6I, | | | | | | |
| CatHI, Eam1104I, | | | | | | |
| EarI, Ksp632I | | | | | | |
| Bco5I, Bco116I, | CTCTT | M.SacI, M.Sgr13350I | GAGCTC | 3, 4 | m5C | GAGCTCTTCN[NNN] |
| BcoKI, BseZI, | C | | | | | |
| Bst6I, Bsu6I, | | | | | | |
| CatHI, Eam1104I, | | | | | | |
| EarI, Ksp632I | | | | | | |
| Bco5I, Bco116I, | CTCTT | M.SuaII | RGATCY | 2, 5 | m5C | RGATCTCTTCN[NNN] |
| BcoKI, BseZI, | C | | | | | |
| Bst6I, Bsu6I, | | | | | | |
| CatHI, Eam1104I, | | | | | | |
| EarI, Ksp632I | | | | | | |
| Bco5I, Bco116I, | CTCTT | M.TacIII | GGCCT | 4 | m4C | GGCCTCTTCN[NNN] |
| BcoKI, BseZI, | C | | | | | |
| Bst6I, Bsu6I, | | | | | | |
| CatHI, Eam1104I, | | | | | | |
| EarI, Ksp632I | | | | | | |
| Bco5I, Bco116I, | CTCTT | M.Tam77409IV | CCRCTC | 4 | m4C | CCRCTCTTCN[NNN] |
| BcoKI, BseZI, | C | | | | | |
| Bst6I, Bsu6I, | | | | | | |
| CatHI, Eam1104I, | | | | | | |
| EarI, Ksp632I | | | | | | |
| Bco5I, Bco116I, | CTCTT | M.TspPM5I | AGGCCT | 2, 5 | m4C | AGGCCTCTTCN[NNN] |
| BcoKI, BseZI, | C | | | | | |
| Bst6I, Bsu6I, | | | | | | |
| CatHI, Eam1104I, | | | | | | |
| EarI, Ksp6321 | | | | | | |
| Bco5I, Bco116I, | CTCTT | M.XmnI | GAANNNN | 2, 9 | m6A | GAANCTCTTCN[NNN] |
| BcoKI, BseZI, | C | | TTC | | | |
| Bst6I, Bsu6I, | | | | | | |
| CatHI, Eam1104I, | | | | | | |
| EarI, Ksp632I | | | | | | |
| Bco5I, Bco116I, | CTCTT | M1.Sgr13350III, M2.Sgr13350III | GCTCTTC | 2, 3 | m4C, | GCTCTTCN[NNN] |
| BcoKI, BseZI, | C | | | | m6A | |
| Bst6I, Bsu6I, | | | | | | |
| CatHI, Eam1104I, | | | | | | |
| EarI, Ksp632I | | | | | | |
| Bco5I, Bco116I, | CTCTT | M2.BstSEI | GACTC | 4 | m6A | GACTCTTCN[NNN] |
| BcoKI, BseZI, | C | | | | | |
| Bst6I, Bsu6I, | | | | | | |
| CatHI, Eam1104I, | | | | | | |
| EarI, Ksp632I | | | | | | |
| Bco5I, Bco116I, | CTCTT | M2.Csu24377II, M2.Hpy298VII, | CCTC | 3 | m6A | CCTCTTCN[NNN] |
| BcoKI, BseZI, | C | M2.Hpy299VI, M2.Hpy30XII, M1.Hpy32VI, | | | | |
| Bst6I, Bsu6I, | | M1.Hpy57VI, M2.Hpy66XIV, M1.Hpy99V, | | | | |
| CatHI, Eam1104I, | | M1.HpyAVI, M1.HpyPVI, M2.HpyUM032VI, | | | | |
| EarI, Ksp632I | | M.Mdi27140I, M2.MnlI | | | | |
| Bco5I, Bco116I, | CTCTT | M2.Eco31I | GGTCTC | 4 | m5C | GGTCTCTTCN[NNN] |
| BcoKI, BseZI, | C | | | | | |
| Bst6I, Bsu6I, | | | | | | |
| CatHI, Eam1104I, | | | | | | |
| EarI, Ksp632I | | | | | | |
| Bli736I, BsaI, | GGTC | M.AbaBs12I, M.Awo1030I, M.Cdu23823I, | CCWGG | 1, 5 | m5C | CCWGGGTCTCN[NNNN], |
| Bso31I, BspTNI, | TC | M.Csa8155II, M.Cun9529I, M.EasL1Dcm, | | | | CCWGGTCTCN[NNNN] |
| Bsu537I, Eco31I, | | M.Eba57Dcm, M.Ecl34399Dcm, | | | | |
| EcoA4I, EcoO44I | | M.Eco12761Dcm, M.Eco3609Dcm, | | | | |
| | | M.Eco4255Dcm, M.EcoVR50Dcm, | | | | |
| | | M.EsaSP1II, M.Kpn34618Dcm, | | | | |
| | | M.Kpn38547Dcm, M.Kpn39I, M.Kpn43816I, | | | | |
| | | M.Kpn677ORFDcm, M.Kpn928Dcm, | | | | |
| | | M.KpnNIH1Dcm, M.KpnNIH10Dcm, | | | | |
| | | M.KpnNIH30Dcm, M.Kva120Dcm, M.Lsp48II, | | | | |
| | | M.Pmi1I, M.SpaD2III, M.SplRp8II, | | | | |
| | | M.SptADcm, M.Tsu2489III | | | | |
| Bli736I, BsaI, | GGTC | M.AciI | GCGG | 2, 4 | m5C | GCGGGTCTCN[NNNN], |
| Bso31I, BspTNI, | TC | | | | | GCGGTCTCN[NNNN] |
| Bsu537I, Eco31I, | | | | | | |
| EcoA4I, EcoO44I | | | | | | |
| Bli736I, BsaI, | GGTC | M.AhdI | GACNNNN | 2, 10 | m6A | GACNNNNGGTCTCN[NNNN] |
| Bso31I, BspTNI, | TC | | NGTC | | | |
| Bsu537I, Eco31I, | | | | | | |
| EcoA4I, EcoO44I | | | | | | |
| Bli736I, BsaI, | GGTC | M.Ama55I, M.CnaPQ2III, M.Rmo1926II, | CGGCCG | 1, 6 | m5C | CGGCCGGTCTCN[NNNN] |
| Bso31I, BspTNI, | TC | M.SenC1765IV, M.SspG1I, M.XorPXII | | | | |
| Bsu537I, Eco31I, | | | | | | |
| EcoA4I, EcoO44I | | | | | | |
| Bli736I, BsaI, | GGTC | M.AquI | CYCGRG | 1, 6 | m5C | CYCGRGGTCTCN[NNNN], |
| Bso31I, BspTNI, | TC | | | | | CYCGGGTCTCN[NNNN] |
| Bsu537I, Eco31I, | | | | | | |
| EcoA4I, EcoO44I | | | | | | |
| Bli736I, BsaI, | GGTC | M.AspU41II, M.BisIII, M.BsuW23II, | CCWGG | 2, 4 | m5C | CCWGGTCTCN[NNNN] |
| Bso31I, BspTNI, | TC | M.CnaPQ2II, M.EcoO6Dcm, M.Eco12581Dcm, | | | | |
| Bsu537I, Eco31I, | | M.Eco1655Dcm, M.Eco29787Dcm, | | | | |
| EcoA4I, EcoO44I | | M.Eco3024Dcm, M.Eco3317Dcm, | | | | |
| | | M.Eco3325Dcm, M.Eco3740Dcm, | | | | |
| | | M.Eco3911Dcm, M.Eco4211Dcm, | | | | |
| | | M.Eco4465Dcm, M.Eco600Dcm, | | | | |
| | | M.Eco644Dcm, M.Eco86Dcm, | | | | |
| | | M.Eco9001Dcm, M.Eco9387Dcm, | | | | |
| | | M.EcoE1140Dcm, M.EcoE455Dcm, | | | | |
| | | M.EcoGDcm, M.EcoNU14Dcm, M.EcoRII, | | | | |
| | | M.Kpn223III, M.Kpn35657II, M.Kpn36Dcm, | | | | |
| | | M.Kpn555I, M.Kpn62629II, M.KpnAATV, | | | | |
| | | M.Kqu603Dcm, M.Psp345I, M.Sen158Dcm, | | | | |
| | | M.Sen641Dcm, M.SenA46Dcm, | | | | |
| | | M.SenAboDcm, M.TcoKWC4II | | | | |
| Bli736I, BsaI, | GGTC | M.AvaIX, M.Cfr10I, M.Nme18VI, M.VchAI, | RCCGGY | 2, 5 | m5C | RCCGGTCTCN[NNNN] |
| Bso31I, BspTNI, | TC | M.Vch0395I | | | | |
| Bsu537I, Eco31I, | | | | | | |
| EcoA4I, EcoO44I | | | | | | |
| Bli736I, BsaI, | GGTC | M.BcoSlacII, M.MspLW5III, M.Nbr128I, | CTCGAG | 1, 6 | m4C | CTCGAGGTCTCN[NNNN] |
| Bso31I, BspTNI, | TC | M.Psy18884II, M.Tam77409II, M.TbrGE1II, | | | | |
| Bsu537I, Eco31I, | | M.TpaRLII | | | | |
| EcoA4I, EcoO44I | | | | | | |
| Bli736I, BsaI | GGTC | M.BepI, M.FpsJV, M.Gel16401III, M.Pdi8503I | CGCG | 1, 4 | m5C | CGCGGTCTCN[NNNN] |
| Bso31I, BspTNI, | TC | | | | | |
| Bsu537I, Eco31I, | | | | | | |
| EcoA4I, EcoO44I | | | | | | |
| Bli736I, BsaI, | GGTC | M.Bhy27164IV, M.BstNI, M.EcoDHB4Dcm, | CCWGG | 2, 4 | m4C | CCWGGTCTCN[NNNN] |
| Bso31I, BspTNI, | TC | M.EcoK54Dcm, M.Gth3570I, M.Hla49239I, | | | | |
| Bsu537I, Eco31I, | | M.MvaI, M.Pdi8503II, M.Sso30807Dcm, | | | | |
| EcoA4I, EcoO44I | | M.YpeI, M.Ype41I, M.YpeShI | | | | |
| Bli736I, BsaI, | GGTC | M.BsoBI | CYCGRG | 1, 6 | m4C | CYCGRGGTCTCN[NNNN], |
| Bso31I, BspTNI, | TC | | | | | CYCGGGTCTCN[NNNN] |
| Bsu537I, Eco31I, | | | | | | |
| EcoA4I, EcoO44I | | | | | | |
| Bli736I, BsaI, | GGTC | M.BsuFI, M.CpeAIV, M.MspI | CCGG | 1, 4 | m5C | CCGGGTCTCN[NNNN], CCGGTCTCN[NNNN] |
| Bso31I, BspTNI, | TC | | | | | |
| Bsu537I, Eco31I, | | | | | | |
| EcoA4I, EcoO44I | | | | | | |
| Bli736I, BsaI, | GGTC | M.Cab13497I, M.Dac11109III, M.Dco13527I, | CTAG | 1, 4 | m4C | CTAGGTCTCN[NNNN] |
| Bso31I, BspTNI, | TC | M.Djo10085I, M.Hbo11551I, M.Hka19301III, | | | | |
| Bsu537I, Eco31I, | | M.Hme33500I, M.HsaR1I, M.Hsi33800I, | | | | |
| EcoA4I, EcoO44I | | M.HspKM1WII, M.HspNII, M.HtuI, M.HvoDSI, | | | | |
| | | M.Lba2029II, M.Mbo45II, M.MjaI, M.MthZI, | | | | |
| | | M.Nas12278I, M.Rfl3010I, M.SsmMI | | | | |
| Bli736I, BsaI, | GGTC | M.Cdi630III | CCSSGG | 2, 5 | m4C | CCSSGGTCTCN[NNNN] |
| Bso31I, BspTNI, | TC | | | | | |
| Bsu537I, Eco31I, | | | | | | |
| EcoA4I, EcoO44I | | | | | | |
| Bli736I, BsaI, | GGTC | M.Cfr9I, M.SmaI, M.Sma36365II, M.Xca85III, | CCCGGG | 2, 5 | m4C | CCCGGGTCTCN[NNNN] |
| Bso31I, BspTNI, | TC | M.XcyI, M.XmaI, M.XveII | | | | |
| Bsu537I, Eco31I, | | | | | | |
| EcoA4I, EcoO44I | | | | | | |
| Bli736I, BsaI, | GGTC | M.CfrBI, M.Sen1735IV, M.SenAnaIV | CCWWGG | 1, 6 | m4C | CCWWGGGTCTCN[NNNN], |
| Bso31I, BspTNI, | TC | | | | | CCWWGGTCTCN[NNNN] |
| Bsu537I, Eco31I, | | | | | | |
| EcoA4I, EcoO44I | | | | | | |
| Bli736I, BsaI | GGTC | M.Cmu51329I, M.EcoJA03PDcm, | CCWGG | 1, 5 | Unknown | CCWGGGTCTCN[NNNN], |
| Bso31I, BspTNI, | TC | M.RorR1Dcm, M.Sen8391Dcm, M.ZalSM2II | | | | CCWGGTCTCN[NNNN] |
| Bsu537I, Eco31I, | | | | | | |
| EcoA4I, EcoO44I | | | | | | |
| Bli736I, BsaI, | GGTC | M.Cpa18696III, M.Ype19I, M.YpeDodI, | CCWGG | 2, 4 | Unknown | CCWGGTCTCN[NNNN] |
| Bso31I, BspTNI, | TC | M.YpeEDI, M.YpeJ9I, M.YpePGI | | | | |
| Bsu537I, Eco31I, | | | | | | |
| EcoA4I, EcoO44I | | | | | | |
| Bli736I, BsaI, | GGTC | M.DdeI | CTNAG | 1, 5 | m5C | CTNAGGTCTCN[NNNN] |
| Bso31I, BspTNI, | TC | | | | | |
| Bsu537I, Eco31I, | | | | | | |
| EcoA4I, EcoO44I | | | | | | |
| Bli736I, BsaI, | GGTC | M.DsaV, M.Ecl18kI, M.FpsJVI, M.NlaX, | CCNGG | 2, 4 | m5C | CCNGGTCTCN[NNNN] |
| Bso31I, BspTNI, | TC | M.SenPI, M.SsoII | | | | |
| Bsu537I, Eco31I, | | | | | | |
| EcoA4I, EcoO44I | | | | | | |
| Bli736I, BsaI, | GGTC | M.Eco29kI, M.NgoAIII, M.SacII | CCGCGG | 2, 5 | m5C | CCGCGGTCTCN[NNNN] |
| Bso31I, BspTNI, | TC | | | | | |
| Bsu537I, Eco31I, | | | | | | |
| EcoA4I, EcoO44I | | | | | | |
| Bli736I, BsaI, | GGTC | M.EcoNI | CCTNNNN | 2, 10 | m4C | CCTNNNNNAGGTCTCN[NNNN] |
| Bso31I, BspTNI, | TC | | NAGG | | | |
| Bsu537I, Eco31I, | | | | | | |
| EcoA4I, EcoO44I | | | | | | |
| Bli736I, BsaI, | GGTC | M.EfaRFII, M.Mae7806II | CCGG | 2, 3 | m4C | CCGGTCTCN[NNNN] |
| Bso31I, BspTNI, | TC | | | | | |
| Bsu537I, Eco31I, | | | | | | |
| EcoA4I, EcoO44I | | | | | | |
| Bli736I, BsaI, | GGTC | M.FatI | CATG | 1, 4 | m5C | CATGGTCTCN[NNNN] |
| Bso31I, BspTNI, | TC | | | | | |
| Bsu537I, Eco31I, | | | | | | |
| EcoA4I, EcoO44I | | | | | | |
| Bli736I, BsaI, | GGTC | M.FisAW1I, M.ThaI, M.Tph12270II | CGCG | 1, 4 | m4C | CGCGGTCTCN[NNNN] |
| Bso31I, BspTNI, | TC | | | | | |
| Bsu537I, Eco31I, | | | | | | |
| EcoA4I, EcoO44I | | | | | | |
| Bli736I, BsaI, | GGTC | M.FnoB1II, M.Hal24586I, M.Hpy298V, | CCGG | 1, 4 | m4C | CCGGGTCTCN[NNNN], CCGGTCTCN[NNNN] |
| Bso31I, BspTNI, | TC | M.Hpy299IX, M.Hpy30V, M.Hpy32XI, | | | | |
| Bsu537I, Eco31I, | | M.Hpy57V, M.Hpy66IX, M.Hpy99VIII, | | | | |
| EcoA4I, EcoO441 | | M.HpyFV, M.HpyUM032IX, M.HpyUM037IX, | | | | |
| | | M.MjaVI, M.PspJDRI, M.TmeBII | | | | |
| Bli736I, BsaI, | GGTC | M.FpsJI, M.HpaII, M.Nme18II, M.NmeAI | CCGG | 2, 3 | m5C | CCGGTCTCN[NNNN] |
| Bso31I, BspTNI, | TC | | | | | |
| Bsu537I, Eco31I, | | | | | | |
| EcoA4I, EcoO44I | | | | | | |
| Bli736I, BsaI, | GGTC | M.Gel16401IV | CTGG | 3 | m5C | CTGGTCTCN[NNNN] |
| Bso31I, BspTNI, | TC | | | | | |
| Bsu537I, Eco31I, | | | | | | |
| EcoA4I, EcoO44I | | | | | | |
| Bli736I, BsaI, | GGTC | M.GsuRed1IV, M.Osp807II, M.Tth111I | GACNNNG | 2, 8 | m6A | GACNNGGTCTCN[NNNN] |
| Bso31I, BspTNI, | TC | | TC | | | |
| Bsu537I, Eco31I, | | | | | | |
| EcoA4I, EcoO44I | | | | | | |
| Bli736I, BsaI | GGTC | M.Hpy298II, M.Hpy299II, M.Hpy66II, | ACNGT | 2, 4 | m4C | ACGGTCTCN[NNNN] |
| Bso31I, BspTNI, | TC | M.HpyUM032II, M.HpyUM037II | | | | |
| Bsu537I, Eco31I, | | | | | | |
| EcoA4I, EcoO44I | | | | | | |
| Bli736I, BsaI, | GGTC | M.Hpy30X, M.Hpy57VIII, M.HpyFXI, M.MhuI | CTNAG | 1, 5 | m4C | CTNAGGTCTCN[NNNN] |
| Bso31I, BspTNI, | TC | | | | | |
| Bsu537I, Eco31I, | | | | | | |
| EcoA4I, EcoO44I | | | | | | |
| Bli736I, BsaI, | GGTC | M.Hpy99IV, M.HpyFORFX | CCNNGG | 1, 6 | m4C | CCNNGGGTCTCN[NNNN], |
| Bso31I, BspTNI, | TC | | | | | CCNNGGTCTCN[NNNN] |
| Bsu537I, Eco31I, | | | | | | |
| EcoA4I, EcoO44I | | | | | | |
| Bli736I, BsaI, | GGTC | M.HpyAV, M.Nme18IV | GAAGG | 3, 4 | m6A, | GAAGGTCTCN[NNNN] |
| Bso31I, BspTNI, | TC | | | | m5C | |
| Bsu537I, Eco31I, | | | | | | |
| EcoA4I, EcoO44I | | | | | | |
| Bli736I, BsaI, | GGTC | M.HpyD27I | GAGG | 2, 4 | m6A, | GAGGGTCTCN[NNNN], |
| Bso31I, BspTNI, | TC | | | | m5C | GAGGTCTCN[NNNN] |
| Bsu537I, Eco31I, | | | | | | |
| EcoA4I, EcoO44I | | | | | | |
| Bli736I, BsaI, | GGTC | M.Lph145I, M.Lph93I | TCWCC | 1 | m6A | GGTCTCC[NNNN] |
| Bso31I, BspTNI, | TC | | | | | |
| Bsu537I, Eco31I, | | | | | | |
| EcoA4I, EcoO44I | | | | | | |
| Bli736I, BsaI, | GGTC | M.Msp1II | CCAGG | 5 | m4C | CCAGGGTCTCN[NNNN], |
| Bso31I, BspTNI, | TC | | | | | CCAGGTCTCN[NNNN] |
| Bsu537I, Eco31I, | | | | | | |
| EcoA4I, EcoO44I | | | | | | |
| Bli736I, BsaI, | GGTC | M.Msp42II | CCWGG | 1, 5 | m4C | CCWGGGTCTCN[NNNN], |
| Bso31I, BspTNI, | TC | | | | | CCWGGTCTCN[NNNN] |
| Bsu537I, Eco31I, | | | | | | |
| EcoA4I, EcoO44I | | | | | | |
| Bli736I, BsaI, | GGTC | M.Nme18III | TCTGG | 2, 4 | m5C | TCTGGTCTCN[NNNN] |
| Bso31I, BspTNI, | TC | | | | | |
| Bsu537I, Eco31I, | | | | | | |
| EcoA4I, EcoO44I | | | | | | |
| Bli736I, BsaI, | GGTC | M.NmeDI | VCCGGY | 2, 5 | m5C | VCCGGTCTCN[NNNN], |
| Bso31I, BspTNI, | TC | | | | | RCCGGGTCTCN[NNNN] |
| Bsu537I, Eco31I, | | | | | | |
| EcoA4I, EcoO44I | | | | | | |
| Bli736I, BsaI, | GGTC | M.NmeMC58III | TCTGG | 5 | m5C | TCTGGGTCTCN[NNNN], |
| Bso31I, BspTNI, | TC | | | | | TCTGGTCTCN[NNNN] |
| Bsu537I, Eco31I, | | | | | | |
| EcoA4I, EcoO44I | | | | | | |
| Bli736I, BsaI, | GGTC | M.Nsp209III, M.Nsp51109II | CTCGAG | 1, 6 | m5C | CTCGAGGTCTCN[NNNN] |
| Bso31I, BspTNI, | TC | | | | | |
| Bsu537I, Eco31I, | | | | | | |
| EcoA4I, EcoO44I | | | | | | |
| Bli736I, BsaI, | GGTC | M.Pam7686I | CCATGG | 1, 6 | m5C | CCATGGGTCTCN[NNNN], |
| Bso31I, BspTNI, | TC | | | | | CCATGGTCTCN[NNNN] |
| Bsu537I, Eco31I, | | | | | | |
| EcoA4I, EcoO44I | | | | | | |
| Bli736I, BsaI, | GGTC | M.Pfa23572II | CGATCG | 1, 6 | m5C | CGATCGGTCTCN[NNNN] |
| Bso31I, BspTNI, | TC | | | | | |
| Bsu537I, Eco31I, | | | | | | |
| EcoA4I, EcoO44I | | | | | | |
| Bli736I, BsaI, | GGTC | M.Pla5I | CTAG | 1, 4 | Unknown | CTAGGTCTCN[NNNN] |
| Bso31I, BspTNI, | TC | | | | | |
| Bsu537I, Eco31I, | | | | | | |
| EcoA4I, EcoO44I | | | | | | |
| Bli736I, BsaI, | GGTC | M.Sam53668II | CCATGG | 1, 6 | Unknown | CCATGGGTCTCN[NNNN], |
| Bso31I, BspTNI, | TC | | | | | CCATGGTCTCN[NNNN] |
| Bsu537I, Eco31I, | | | | | | |
| EcoA4I, EcoO44I | | | | | | |
| Bli736I, BsaI, | GGTC | M.Sen1781III | CCWWGG | 1, 6 | Unknown | CCWWGGGTCTCN[NNNN], |
| Bso31I, BspTNI, | TC | | | | | CCWWGGTCTCN[NNNN] |
| Bsu537I, Eco31I, | | | | | | |
| EcoA4I, EcoO44I | | | | | | |
| Bli736I, BsaI, | GGTC | M.SonIII | GCANNNN | 3, 9 | m6A | GCANNNGGTCTCN[NNNN] |
| Bso31I, BspTNI, | TC | | GTC | | | |
| Bsu537I, Eco31I, | | | | | | |
| EcoA4I, EcoO44I | | | | | | |
| Bli736I, BsaI, | GGTC | M.TdeII | GAAGAG | 5, 6 | m6A, | GAAGAGGTCTCN[NNNN] |
| Bso31I, BspTNI, | TC | | | | m4C | |
| Bsu537I, Eco31I, | | | | | | |
| EcoA4I, EcoO44I | | | | | | |
| Bli736I, BsaI, | GGTC | M.TspRI | CASTG | 1, 5 | m5C | CASTGGTCTCN[NNNN] |
| Bso31I, BspTNI, | TC | | | | | |
| Bsu537I, Eco31I, | | | | | | |
| EcoA4I, EcoO44I | | | | | | |
| Bli736I, BsaI, | GGTC | M1.AgoG2I, M2.AgoG2I | ACTGG | 2, 5 | m4C | ACTGGGTCTCN[NNNN], |
| Bso31I, BspTNI, | TC | | | | | ACTGGTCTCN[NNNN] |
| Bsu537I, Eco31I, | | | | | | |
| EcoA4I, EcoO44I | | | | | | |
| Bli736I, BsaI, | GGTC | M1.Bag18758II, M2.Bag18758II | CACGGG | 3, 5 | Unknown | CACGGGTCTCN[NNNN] |
| Bso31I, BspTNI, | TC | | | | | |
| Bsu537I, Eco31I, | | | | | | |
| EcoA4I, EcoO44I | | | | | | |
| Bli736I, BsaI, | GGTC | M1.BcnI, M2.BcnI, M.NciI | CCSGG | 2, 4 | m4C | CCSGGTCTCN[NNNN] |
| Bso31I, BspTNI, | TC | | | | | |
| Bsu537I, Eco31I, | | | | | | |
| EcoA4I, EcoO44I | | | | | | |
| Bli736I, BsaI, | GGTC | M1.BfiI | ACTGGG | 5 | m4C | ACTGGGTCTCN[NNNN] |
| Bso31I, BspTNI, | TC | | | | | |
| Bsu537I, Eco31I, | | | | | | |
| EcoA4I, EcoO44I | | | | | | |
| Bli736I, BsaI, | GGTC | M1.BspACI | GCGG | 4 | m5C | GCGGGTCTCN[NNNN], |
| Bso31I, BspTNI, | TC | | | | | GCGGTCTCN[NNNN] |
| Bsu537I, Eco31I, | | | | | | |
| EcoA4I, EcoO44I | | | | | | |
| Bli736I, BsaI, | GGTC | M1.Hpy32II | TCYYC | 1 | m6A | GGTCTCC[NNNN] |
| Bso31I, BspTNI, | TC | | | | | |
| Bsu537I, Eco31I, | | | | | | |
| EcoA4I, EcoO44I | | | | | | |
| Bli736I, BsaI, | GGTC | M1.LplAG30I | GAAGG | 5 | m5C | GAAGGGTCTCN[NNNN], |
| Bso31I, BspTNI, | TC | | | | | GAAGGTCTCN[NNNN] |
| Bsu537I, Eco31I, | | | | | | |
| EcoA4I, EcoO44I | | | | | | |
| Bli736I, BsaI, | GGTC | M2.BfuAI | GCAGGT | 5 5 | m5C | GCAGGTCTCN[NNNN] |
| Bso31I, BspTNI, | TC | | | | | |
| Bsu537I, Eco31I, | | | | | | |
| EcoA4I, EcoO44I | | | | | | |
| Bli736I, BsaI, | GGTC | M2.HpyAVI, M1.MnlI | GAGG | 4 | m5C | GAGGGTCTCN[NNNN], |
| Bso31I, BspTNI, | TC | | | | | GAGGTCTCN[NNNN] |
| Bsu537I, Eco31I, | | | | | | |
| EcoA4I, EcoO44I | | | | | | |
| BsmBI, BstGZ53I, | CGTCT | M.AatII, M.Lsp6406III | GACGTC | 2, 5 | m6A | GACGTCTCN[NNNN] |
| Esp3I | C | | | | | |
| BsmBI, BstGZ53I, | CGTCT | M.AflIII | ACRYGT | 2, 5 | m4C | ACRCGTCTCN[NNNN] |
| Esp3I | C | | | | | |
| BsmBI, BstGZ53I, | CGTCT | M.AhdI | GACNNNN | 2, 10 | m6A | GACNNNNCGTCTCN[NNNN] |
| Esp3I | C | | NGTC | | | |
| BsmBI, BstGZ53I, | CGTCT | M.Ama55I, M.CnaPQ2III, M.Rmo1926II, | CGGCCG | 1, 6 | m5C | CGGCCGTCTCN[NNNN] |
| Esp3I | C | M.SenC1765IV, M.SspG1I, M.XorPXII | | | | |
| BsmBI, BstGZ53I, | CGTCT | M.AvaV, M.SliSI | GATC | 1, 4 | m4C | GATCGTCTCN[NNNN] |
| Esp3I | C | | | | | |
| BsmBI, BstGZ53I, | CGTCT | M.BceSII | GGWCC | 1, 5 | m5C | GGWCCGTCTCN[NNNN] |
| Esp3I | C | | | | | |
| BsmBI, BstGZ53I, | CGTCT | M.BepI, M.FpsJV, M.Gel16401III, M.Pdi8503I | CGCG | 1, 4 | m5C | CGCGTCTCN[NNNN] |
| Esp3I | C | | | | | |
| BsmBI, BstGZ53I, | CGTCT | M.Bg12196III | CGTACG | 2, 5 | m4C | CGTACGTCTCN[NNNN] |
| Esp3I | C | | | | | |
| BsmBI, BstGZ53I, | CGTCT | M.Bsp14III, M.Bsp3003I, M.Bsp3004I, | GATC | 1, 4 | m5C | GATCGTCTCN[NNNN] |
| Esp3I | C | M.CalB3III, M.CpeAIII, M.Esu35585I, | | | | |
| | | M.FpsJIV, M.Lba2031I, M.Lbo2004I, | | | | |
| | | M.LlaKR2I, M.Lmo1042I, M.Lmo7956II, | | | | |
| | | M.Lsp10393II, M.MspI7I, M.Sau3AI, M.Sba3I, | | | | |
| | | M.Sin395I, M.Spn23FI, M.Sth368I | | | | |
| BsmBI, BstGZ53I, | CGTCT | M.CagVIII | ACGCGT | 2, 5 | m4C | ACGCGTCTCN[NNNN] |
| Esp3I | C | | | | | |
| BsmBI, BstGZ53I, | CGTCT | M.CocIII, M.Fsi4947II, M.TdeIII, | GGNCC | 1, 5 | m4C | GGNCCGTCTCN[NNNN] |
| Esp3I | C | M.Tph12270I | | | | |
| BsmBI, BstGZ53I, | CGTCT | M.CviJI | RGCB | 2, 3 | m5C | RGCGTCTCN[NNNN] |
| Esp3I | C | | | | | |
| BsmBI, BstGZ53I, | CGTCT | M.Dac11109II, M.Hfo6591I, M.MhuII, | GTAC | 1, 4 | m4C | GTACGTCTCN[NNNN] |
| Esp3I | C | M.MjaV, M.MlaZII, M.MspLW5I, M.RsaI | | | | |
| BsmBI, BstGZ53I, | CGTCT | M.FisAW1I, M.ThaI, M.Tph12270II | CGCG | 1, 4 | m4C | CGCGTCTCN[NNNN] |
| Esp3I | C | | | | | |
| BsmBI, BstGZ53I, | CGTCT | M.GsuRed1IV, M.Osp807II, M.Tth111I | GACNNNG | 2, 8 | m6A | GACNNCGTCTCN[NNNN] |
| Esp31 | C | | TC | | | |
| BsmBI, BstGZ53I, | CGTCT | M.Hpy298II, M.Hpy299II, M.Hpy66II, | ACNGT | 2, 4 | m4C | ACCGTCTCN[NNNN] |
| Esp3I | C | M.HpyUM032II, M.HpyUM037II | | | | |
| BsmBI, BstGZ53I, | CGTCT | M.Hpy66I, M.Hpy99I | CGWCG | 2, 4 | m4C | CGWCGTCTCN[NNNN] |
| Esp3I | C | | | | | |
| BsmBI, BstGZ53I, | CGTCT | M.Hpy99XI | ACGT | 2, 3 | m5C | ACGTCTCN[NNNN] |
| Esp3I | C | | | | | |
| BsmBI, BstGZ53I, | CGTCT | M.Lph145I, M.Lph93I | TCWCC | 1 | m6A | CGTCTCC[NNNN] |
| Esp3I | C | | | | | |
| BsmBI, BstGZ53I, | CGTCT | M.MjaII | GGNCC | 1, 5 | m5C | GGNCCGTCTCN[NNNN] |
| Esp3I | C | | | | | |
| BsmBI, BstGZ53I, | CGTCT | M.NheI | GCTAGC | 1, 6 | m4C | GCTAGCGTCTCN[NNNN] |
| Esp3I | C | | | | | |
| BsmBI, BstGZ53I, | CGTCT | M.Pfa23572II | CGATCG | 1, 6 | m5C | CGATCGTCTCN[NNNN] |
| Esp3I | C | | | | | |
| BsmBI, BstGZ53I, | CGTCT | M.SonIII | GCANNNN | 3, 9 | m6A | GCANNNCGTCTCN[NNNN] |
| Esp3I | C | | GTC | | | |
| BsmBI, BstGZ53I, | CGTCT | M1.BceSIII | GCCGT | 4 | m4C | GCCGTCTCN[NNNN] |
| Esp3I | C | | | | | |
| BsmBI, BstGZ53I, | CGTCT | M1.Dsh12II, M2.Dsh12II | GCCGTC | 3, 4 | m4C | GCCGTCTCN[NNNN] |
| Esp3I | C | | | | | |
| BsmBI, BstGZ53I, | CGTCT | M1.HgaI, M2.LlaJI | GCGTC | 2 | m5C | GCGTCTCN[NNNN] |
| Esp3I | C | | | | | |
| BsmBI, BstGZ53I, | CGTCT | M1.Hpy32II | TCYYC | 1 | m6A | CGTCTCC[NNNN] |
| Esp3I | C | | | | | |
| BsmBI, BstGZ53I, | CGTCT | M2.BceSIII, M1.Pru9I, M2.Pru91 | GCCGT | 2, 4 | m4C | GCCGTCTCN[NNNN] |
| Esp3I | C | | | | | |
| BsmBI, BstGZ53I, | CGTCT | M2.HgaI, M1.LlaJI | GCGTC | 3 | m5C | GCGTCTCN[NNNN] |
| Esp3I | C | | | | | |
| BsmBI, BstGZ53I, | CGTCT | M2.Nme579IV, M2.NmeMC58II | GCGTC | 4 | m6A | GCGTCTCN[NNNN] |
| Esp3I | C | | | | | |
| BtgZI | GCGA | M.AbaBs12I, M.Awo1030I, M.Cdu23823I, | CCWGG | 1, 5 | m5C | CCWGGCGATGNNNNNNNNNN[NNNN] |
| | TG | M.Csa8155II, M.Cun9529I, M.EasL1Dcm, | | | | |
| | | M.Eba57Dcm, M.Ec134399Dcm, | | | | |
| | | M.Eco12761Dcm, M.Eco3609Dcm, | | | | |
| | | M.Eco4255Dcm, M.EcoVR50Dcm, | | | | |
| | | M.EsaSP1II, M.Kpn34618Dcm, | | | | |
| | | M.Kpn38547Dcm, M.Kpn39I, M.Kpn43816I, | | | | |
| | | M.Kpn677ORFDcm, M.Kpn928Dcm, | | | | |
| | | M.KpnNIH1Dcm, M.KpnNIH10Dcm, | | | | |
| | | M.KpnNIH30Dcm, M.Kva120Dcm, M.Lsp48I, | | | | |
| | | M.Pmi1I, M.SpaD2III, M.SplRp8II, | | | | |
| | | M.SptADcm, M.Tsu2489III | | | | |
| BtgZI | GCGA | M.AciI | CCGC | 1, 3 | m5C | GCGGCGATGNNNNNNNNNN[NNNN], |
| | TG | | | | | CCGCGATGNNNNNNNNNN[NNNN] |
| BtgZI | GCGA | M.Ama55I, M.CnaPQ2III, M.Rmo1926II, | CGGCCG | 1, 6 | m5C | CGGCCGCGATGNNNNNNNNNN[NNNN] |
| | TG | M.SenC1765IV, M.SspG1I, M.XorPXII | | | | |
| BtgZI | GCGA | M.AquI | CYCGRG | 1, 6 | m5C | CYCGRGCGATGNNNNNNNNNN[NNNN] |
| | TG | | | | | |
| BtgZI | GCGA | M.AsiSI | GCGATCGC | 2, 7 | m5C | GCGATCGCGATGNNNNNNNNNN[NNNN] |
| | TG | | | | | |
| BtgZI | GCGA | M.AvaIX, M.Cfr10I, M.Nme18VI, M.VchAI, | RCCGGY | 2, 5 | m5C | RCCGGCGATGNNNNNNNNNN[NNNN] |
| | TG | M.Vch0395I | | | | |
| BtgZI | GCGA | M.AvaV, M.SliSI | GATC | 1, 4 | m4C | GCGATGATCNNNNNNN[NNNN] |
| | TG | | | | | |
| BtgZI | GCGA | M.BamWS8I, M.CthV, M.EfaRFI, M.Saf8902II, | GCWGC | 2, 4 | m5C | GCWGCGATGNNNNNNNNNN[NNNN] |
| | TG | M.TacII, M.TcoKWC4III | | | | |
| BtgZI | GCGA | M.BbvI, M.BceSIV | GCAGC | 2, 4 | m5C | GCTGCGATGNNNNNNNNNN[NNNN], |
| | TG | | | | | GCAGCGATGNNNNNNNNNN[NNNN] |
| BtgZI | GCGA | M.BceSII | GGWCC | 1, 5 | m5C | GCGATGGWCCNNNNNN[NNNN] |
| | TG | | | | | |
| BtgZI | GCGA | M.BcoSlacII, M.MspLW5III, M.Nbr128I, | CTCGAG | 1, 6 | m4C | CTCGAGCGATGNNNNNNNNNN[NNNN] |
| | TG | M.Psy18884II, M.Tam77409II, M.TbrGE1II, | | | | |
| | | M.TpaRLII | | | | |
| BtgZI | GCGA | M.BepI, M.FpsJV, M.Gel16401III, M.Pdi8503I | CGCG | 1, 4 | m5C | CGCGCGATGNNNNNNNNNN[NNNN], |
| | TG | | | | | CGCGATGNNNNNNNNNN[NNNN] |
| BtgZI | GCGA | M.BfaSIII, M.Ccl10114I, M.CfrB38I, | ATGCAT | 2, 5 | m6A | GCGATGCATNNNNNNN[NNNN] |
| | TG | M.CfrH1I, M.EcoGVI, M.EcoKII, | | | | |
| | | M.Fnu10562II, M.SbaUIV, M.Sbo12419III, | | | | |
| | | M.Sbo268II, M.Sen10384II, M.Sen10708II, | | | | |
| | | M.Sen1080II, M.Sen1175III, M.Sen13IV, | | | | |
| | | M.Sen13311IV, M.Sen1387II, M.Sen1427III, | | | | |
| | | M.Sen14882III, M.Sen15791III, M.Sen158III, | | | | |
| | | M.Sen16I, M.Sen1655III, M.Sen1676III, | | | | |
| | | M.Sen1677III, M.Sen1728III, M.Sen1735III, | | | | |
| | | M.Sen1736IV, M.Sen1764III, M.Sen1766III, | | | | |
| | | M.Sen1781IV, M.Sen1783III, M.Sen18569II, | | | | |
| | | M.Sen1878III, M.Sen1880III, M.Sen1896III, | | | | |
| | | M.Sen1898III, M.Sen1899III, M.Sen1903III, | | | | |
| | | M.Sen1906III, M.Sen1908III, M.Sen1910III, | | | | |
| | | M.Sen1921III, M.Sen1927II, M.Sen195II, | | | | |
| | | M.Sen2050II, M.Sen2064III, M.Sen2069III, | | | | |
| | | M.Sen22462I, M.Sen255II, M.Sen318III, | | | | |
| | | M.Sen3387III, M.Sen3890III, M.Sen483III, | | | | |
| | | M.Sen624III, M.Sen641III, M.Sen7378II, | | | | |
| | | M.Sen8391III, M.Sen8692III, M.SenA46III, | | | | |
| | | M.SenAbaII, M.SenAboII, M.SenAnaIII, | | | | |
| | | M.SenC1736III, M.SenC1765III, | | | | |
| | | M.SenC1808IV, M.SenC1810III, M.SenJIII, | | | | |
| | | M.SenL1II, M.SenL15III, M.SenN1660II, | | | | |
| | | M.SenSARA26II, M.SenSPBIII, M.SenTFIII | | | | |
| BtgZI | GCGA | M.BglI, M.CagI, M.DdeVCDI, M.GsuRed1I | GCCNNNN | 2, 10 | m4C | GCCNNNNNGGCGATGNNNNNNNNNN[NNNN] |
| | TG | | NGGC | | | |
| BtgZI | GCGA | M.BsoBI | CYCGRG | 1, 6 | m4C | CYCGRGCGATGNNNNNNNNNN[NNNN] |
| | TG | | | | | |
| BtgZI | GCGA | M.Bsp14III, M.Bsp3003I, M.Bsp3004I, | GATC | 1, 4 | m5C | GCGATGATCNNNNNNN[NNNN] |
| | TG | M.CalB3III, M.CpeAIII, M.Esu35585I, | | | | |
| | | M.FpsJIV, M.Lba2031I, M.Lbo2004I, | | | | |
| | | M.LlaKR2I, M.Lmo1042I, M.Lmo7956II, | | | | |
| | | M.Lsp10393II, M.MspI7I, M.Sau3AI, M.Sba3I, | | | | |
| | | M.Sin395I, M.Spn23FI, M.Sth368I | | | | |
| BtgZI | GCGA | M.BstXI | CCANNNN | 3, 10 | m6A | CCANNGCGATGGNNNNNNNNN[NNNN] |
| | TG | | NNTGG | | | |
| BtgZI | GCGA | M.BsuFI, M.CpeAIV, M.MspI | CCGG | 1, 4 | m5C | CCGGCGATGNNNNNNNNNN[NNNN] |
| | TG | | | | | |
| BtgZI | GCGA | M.Cab13497I, M.Dac11109III, M.Dco13527I, | CTAG | 1, 4 | m4C | CTAGCGATGNNNNNNNNNN[NNNN] |
| | TG | M.Djo10085I, M.Hbo11551I, M.Hka19301III, | | | | |
| | | M.Hme33500I, M.HsaR1I, M.Hsi33800I, | | | | |
| | | M.HspKM1WII, M.HspNII, M.HtuI, M.HvoDSI, | | | | |
| | | M.Lba2029II, M.Mbo45II, M.MjaI, M.MthZI, | | | | |
| | | M.Nas12278I, M.Rfl3010I, M.SsmMI | | | | |
| BtgZI | GCGA | M.Cac8I | GCNNGC | 2, 5 | m5C | GCNNGCGATGNNNNNNNNNN[NNNN] |
| | TG | | | | | |
| BtgZI | GCGA | M.CcrNAV | YGCCGGCR | 3, 6 | m5C | YGCCGGCGATGNNNNNNNNNN[NNNN] |
| | TG | | | | | |
| BtgZI | GCGA | M.Cdi630IV, M.Ckr177III, M.CmaLM2II, | GCNGC | 2, 4 | m5C | GCNGCGATGNNNNNNNNNN[NNNN] |
| | TG | M.CocII, M.Fnu4HI, M.Fsp4HI | | | | |
| BtgZI | GCGA | M.CfrBI, M.Sen1735IV, M.SenAnaIV | CCWWGG | 1, 6 | m4C | CCWWGGCGATGNNNNNNNNNN[NNNN] |
| | TG | | | | | |
| BtgZI | GCGA | M.Cmu51329I, M.EcoJA03PDcm, | CCWGG | 1, 5 | Unknown | CCWGGCGATGNNNNNNNNNN[NNNN] |
| | TG | M.RorR1Dcm, M.Sen8391Dcm, M.ZalSM2II | | | | |
| BtgZI | GCGA | M.CocIII, M.Fsi4947II, M.TdeIII, | GGNCC | 1, 5 | m4C | GCGATGGNCCNNNNNN[NNNN] |
| | TG | M.Tph12270I | | | | |
| BtgZI | GCGA | M.CsiFSMII, M.MfoCT6IV, M.NgoAIV, | GCCGGC | 2, 5 | m5C | GCCGGCGATGNNNNNNNNNN[NNNN] |
| | TG | M.NgoMIV, M1.Sgr13350II | | | | |
| BtgZI | GCGA | M.CviJI | RGCB | 2, 3 | m5C | RGCGATGNNNNNNNNNN[NNNN] |
| | TG | | | | | |
| BtgZI | GCGA | M.CviRI, M.Hpy298VIII, M.Hpy299VIII, | TGCA | 1, 4 | m6A | GCGATGCANNNNNNNN[NNNN] |
| | TG | M.Hpy30VI, M.Hpy32V, M.Hpy57II, | | | | |
| | | M.Hpy66VIII, M.HpyFVI, M.HpyUM032VIII, | | | | |
| | | M.HpyUM037VIII | | | | |
| BtgZI | GCGA | M.Dac11109II, M.Hfo6591I, M.MhuII, | GTAC | 1, 4 | m4C | GCGATGTACNNNNNNN[NNNN] |
| | TG | M.MjaV, M.MlaZII, M.MspLW5I, M.RsaI | | | | |
| BtgZI | GCGA | M.DdeI | CTNAG | 1, 5 | m5C | CTNAGCGATGNNNNNNNNNN[NNNN] |
| | TG | | | | | |
| BtgZI | GCGA | M.Esp1396I | CCANNNN | 3, 9 | m6A | CCANGCGATGGNNNNNNNNN[NNNN] |
| | TG | | NTGG | | | |
| BtgZI | GCGA | M.FatI | CATG | 1, 4 | m5C | CATGCGATGNNNNNNNNNN[NNNN] |
| | TG | | | | | |
| BtgZI | GCGA | M.FisAW1I, M.ThaI, M.Tph12270II | CGCG | 1, 4 | m4C | CGCGCGATGNNNNNNNNNN[NNNN], |
| | TG | | | | | CGCGATGNNNNNNNNNN[NNNN] |
| BtgZI | GCGA | M.FnoB1II, M.Hal24586I, M.Hpy298V, | CCGG | 1, 4 | m4C | CCGGCGATGNNNNNNNNNN[NNNN] |
| | TG | M.Hpy299IX, M.Hpy30V, M.Hpy32XI, | | | | |
| | | M.Hpy57V, M.Hpy66IX, M.Hpy99VIII, | | | | |
| | | M.HpyFV, M.HpyUM032IX, M.HpyUM037IX, | | | | |
| | | M.MjaVI, M.PspJDRI, M.TmeBII | | | | |
| BtgZI | GCGA | M.HhaI, M.HinP1I, M.Hpy99III, M.HpyAVIII, | GCGC | 2, 3 | m5C | GCGCGATGNNNNNNNNNN[NNNN] |
| | TG | M.HpyUM032XV | | | | |
| BtgZI | GCGA | M.Hka19301IV | TCGCGA | 2, 5 | m4C | TCGCGATGNNNNNNNNNN[NNNN] |
| | TG | | | | | |
| BtgZI | GCGA | M.Hme33500II | MGCWGCD | 5 | m4C | MGCWGCGATGNNNNNNNNNN[NNNN] |
| | TG | | | | | |
| BtgZI | GCGA | M.Hpy30VIII, M.Hpy32VIII, M.Hpy57III, | TCNNGA | 1, 6 | m6A | TCGCGATGNNNNNNNNNN[NNNN] |
| | TG | M.Hpy66VI, M.Hpy99XVIII, M.HpyFVIII, | | | | |
| | | M.HpyPVIII | | | | |
| BtgZI | GCGA | M.Hpy30X, M.Hpy57VIII, M.HpyFXI, M.MhuI | CTNAG | 1, 5 | m4C | CTNAGCGATGNNNNNNNNNN[NNNN] |
| | TG | | | | | |
| BtgZI | GCGA | M.Hpy99IV, M.HpyFORFX | CCNNGG | 1, 6 | m4C | CCNNGGCGATGNNNNNNNNNN[NNNN] |
| | TG | | | | | |
| BtgZI | GCGA | M.HpyD27I | GAGG | 2, 4 | m6A, | GAGGCGATGNNNNNNNNNN[NNNN] |
| | TG | | | | m5C | |
| BtgZI | GCGA | M.MjaII | GGNCC | 1, 5 | m5C | GCGATGGNCCNNNNNN[NNNN] |
| | TG | | | | | |
| BtgZI | GCGA | M.Msp1II | CCAGG | 5 | m4C | CCAGGCGATGNNNNNNNNNN [NNNN] |
| | TG | | | | | |
| BtgZI | GCGA | M.Msp42II | CCWGG | 1, 5 | m4C | CCWGGCGATGNNNNNNNNNN[NNNN] |
| | TG | | | | | |
| BtgZI | GCGA | M.NheI | GCTAGC | 1, 6 | m4C | GCTAGCGATGNNNNNNNNNN[NNNN], |
| | TG | | | | | GCGATGCTAGCNNNNN[NNNN] |
| BtgZI | GCGA | M.Nme18V | GCGCGC | 2, 5 | m5C | GCGCGCGATGNNNNNNNNNN[NNNN] |
| | TG | | | | | |
| BtgZI | GCGA | M.NmeDI | VCCGGY | 2, 5 | m5C | VCCGGCGATGNNNNNNNNNN[NNNN] |
| | TG | | | | | |
| BtgZI | GCGA | M.NmeMC58III | TCTGG | 5 | m5C | TCTGGCGATGNNNNNNNNNN[NNNN] |
| | TG | | | | | |
| BtgZI | GCGA | M.Nsp209III, M.Nsp51109II | CTCGAG | 1, 6 | m5C | CTCGAGCGATGNNNNNNNNNN[NNNN] |
| | TG | | | | | |
| BtgZI | GCGA | M.NspI, M.NspHI | RCATGY | 2, 5 | m5C | RCATGCGATGNNNNNNNNNN[NNNN] |
| | TG | | | | | |
| BtgZI | GCGA | M.Pam7686I | CCATGG | 1, 6 | m5C | CCATGGCGATGNNNNNNNNNN[NNNN] |
| | TG | | | | | |
| BtgZI | GCGA | M.Pfa23572II | CGATCG | 1, 6 | m5C | CGATCGCGATGNNNNNNNNNN[NNNN] |
| | TG | | | | | |
| BtgZI | GCGA | M.Pla5I | CTAG | 1, 4 | Unknown | CTAGCGATGNNNNNNNNNN[NNNN] |
| | TG | | | | | |
| BtgZI | GCGA | M.Sam53668II | CCATGG | 1, 6 | Unknown | CCATGGCGATGNNNNNNNNNN[NNNN] |
| | TG | | | | | |
| BtgZI | GCGA | M.Sen1781III | CCWWGG | 1, 6 | Unknown | CCWWGGCGATGNNNNNNNNNN[NNNN] |
| | TG | | | | | |
| BtgZI | GCGA | M.SonIII | GACNNNN | 2, 8 | m6A | GACGCGATGCNNNNNNNNN[NNNN] |
| | TG | | TGC | | | |
| BtgZI | GCGA | M.TdeII | GAAGAG | 5, 6 | m6A, | GAAGAGCGATGNNNNNNNNNN[NNNN] |
| | TG | | | | m4C | |
| BtgZI | GCGA | M.TspRI | CASTG | 1, 5 | m5C | CASTGCGATGNNNNNNNNNN[NNNN] |
| | TG | | | | | |
| BtgZI | GCGA | M.XcmI | CCANNNN | 3, 13 | m6A | CCANNNNNGCGATGGNNNNNNNNN[NNNN] |
| | TG | | NNNNNTG | | | |
| | | | G | | | |
| BtgZI | GCGA | M.Yen2516I | GCGCGC | 2, 5 | Unkno | GCGCGCGATGNNNNNNNNNN[NNNN] |
| | TG | | | | wn | |
| BtgZI | GCGA | M1.AgoG2I, M2.AgoG2I | ACTGG | 2, 5 | m4C | ACTGGCGATGNNNNNNNNNN[NNNN] |
| | TG | | | | | |
| BtgZI | GCGA | M1.BccI, M1.Hpy30XI, M2.Hpy66X, | GATGG | 2 | m6A | GCGATGGNNNNNNNNN[NNNN] |
| | TG | M1.Jsp2502I, M2.MmyCVI | | | | |
| BtgZI | GCGA | M1.BhaI, M1.Bst19I, M.Fnu10562III, | GATGC | 3 | m6A | GCGATGCNNNNNNNNN[NNNN] |
| | TG | M1.Mbo45IV, M2.Mbo45IV | | | | |
| BtgZI | GCGA | M1.BspACI | GCGG | 4 | m5C | GCGGCGATGNNNNNNNNNN[NNNN] |
| | TG | | | | | |
| BtgZI | GCGA | M1.Csp16704IV, M2.Csp16704IV, | GATGC | 2, 3 | m6A | GCGATGCNNNNNNNNN[NNNN] |
| | TG | M.Lsp10393I, M.Mha183II, M.Mha185II, | | | | |
| | | M.Mha807II, M.Mva1312II | | | | |
| BtgZI | GCGA | M1.HgaI, M2.LlaJI | GACGC | 4 | m5C | GACGCGATGNNNNNNNNNN[NNNN] |
| | TG | | | | | |
| BtgZI | GCGA | M1.Hpy299X, M2.Hpy32XIII, M1.HpyFXIII, | GATGG | 2, 3 | m6A | GCGATGGNNNNNNNNN[NNNN] |
| | TG | M2.HpyFXIII, M2.HpyUM037VI, M1.McaCI, | | | | |
| | | M2.McaCI, M1.PspHUN102II, | | | | |
| | | M2.PspHUN102II | | | | |
| BtgZI | GCGA | M1.LplAG30I | GAAGG | 5 | m5C | GAAGGCGATGNNNNNNNNNN[NNNN] |
| | TG | | | | | |
| BtgZI | GCGA | M1.Sgr13350III, M2.Sgr13350III | GAAGAGC | 5, 6 | m6A, | GAAGAGCGATGNNNNNNNNNN[NNNN] |
| | TG | | | | m4C | |
| BtgZI | GCGA | M2.BccI, M2.Hpy299X, M1.Hpy66X, | GATGG | 3 | m6A | GCGATGGNNNNNNNNN[NNNN] |
| | TG | M1.HpyC1I, M2.HpyC1I, M1.HpyUM032X, | | | | |
| | | M2.Jsp2502I, M1.MmyCVI | | | | |
| BtgZI | GCGA | M2.BceSIII, M1.Pru9I, M2.Pru9I | ACGGC | 2, 4 | m4C | ACGGCGATGNNNNNNNNNN[NNNN] |
| | TG | | | | | |
| BtgZI | GCGA | M2.BhaI | GATGC | 2 | m6A | GCGATGCNNNNNNNNN[NNNN] |
| | TG | | | | | |
| BtgZI | GCGA | M2.HpyAVI, M1.MnlI | GAGG | 4 | m5C | GAGGCGATGNNNNNNNNNN[NNNN] |
| | TG | | | | | |
| RleAI | CCCAC | M.AflIII | ACRYGT | 2, 5 | m4C | CCCACAYGTNNNNNN[NNN] |
| | A | | | | | |
| RleAI | CCCAC | M.AluBI | AGCT | 1, 4 | m6A | CCCACAGCTNNNNNN[NNN] |
| | A | | | | | |
| RleAI | CCCAC | M.ApaI | GGGCCC | 3, 4 | m5C | GGGCCCACANNNNNNNNN[NNN] |
| | A | | | | | |
| RleAI | CCCAC | M.AspDUT2II, M.BstYI, M.CagIII, | RGATCY | 2, 5 | m4C | RGATCCCACANNNNNNNNN[NNN] |
| | A | M.Mpa1757V, M.Mru1279V, M.RsaIII, | | | | |
| | | M.XhoII | | | | |
| RleAI | CCCAC | M.AspWA102I, M.AvaVII, M.BceJII, M.CbeI, | GGCC | 2, 3 | m4C | GGCCCACANNNNNNNNN[NNN] |
| | A | M.Ckr177II, M.CmaLM2IV, M.CpeAVII, | | | | |
| | | M.Csp323II, M.PhoI, M.Ssp6714III, M.SuaI | | | | |
| RleAI | CCCAC | M.Asu14238I, M.Bhy27164III, M.CagIX, | CATG | 2, 3 | m6A | CCCACATGNNNNNNN[NNN] |
| | A | M.Cje11351II, M.CviAII, M.CviQVII, | | | | |
| | | M.Fli6794III, M.Gli15749I, M.HauIII, M.HpyI, | | | | |
| | | M.Hpy166IV, M.Hpy188II, M.Hpy298I, | | | | |
| | | M.Hpy299I, M.Hpy30I, M.Hpy32I, M.Hpy57I, | | | | |
| | | M.Hpy66XI, M.Hpy99X, M.HpyAI, M.HpyFI, | | | | |
| | | M.HpyPI, M.HpyUM032I, M.HpyUM037I, | | | | |
| | | M.Lsp48II, M.LspLP1II, M.NlaIII, M.NsaI, | | | | |
| | | M.Sba3II, M.SdeAIII, M.SspT436I, M.ThaIV, | | | | |
| | | M.TvoI | | | | |
| RleAI | CCCAC | M.AvaV, M.SliSI | GATC | 1, 4 | m4C | GATCCCACANNNNNNNNN[NNN] |
| | A | | | | | |
| RleAI | CCCAC | M.BamHI | GGATCC | 2, 5 | m4C | GGATCCCACANNNNNNNNN[NNN] |
| | A | | | | | |
| RleAI | CCCAC | M.BanII, M.EcoT38I | GRGCYC | 3, 4 | m5C | GRGCCCACANNNNNNNNN[NNN] |
| | A | | | | | |
| RleAI | CCCAC | M.BanLII, M.CpeAII, M.SinI | GGWCC | 2, 4 | m5C | GGWCCCACANNNNNNNNN[NNN] |
| | A | | | | | |
| RleAI | CCCAC | M.BceSII | GGWCC | 1, 5 | m5C | GGWCCCCACANNNNNNNNN[NNN], |
| | A | | | | | GGWCCCACANNNNNNNNN[NNN] |
| RleAI | CCCAC | M.BglI, M.CagI, M.DdeVCDI, M.GsuRed1I | GCCNNNN | 2, 10 | m4C | GCCCACANGGCNNNNN[NNN] |
| | A | | NGGC | | | |
| RleAI | CCCAC | M.BhaII, M.BspRI, M.BsuRI, M.CthVI, | GGCC | 2, 3 | m5C | GGCCCACANNNNNNNNN[NNN] |
| | A | M.DthLII, M.HaeIII, M.MthTI, M.NgoAII, | | | | |
| | | M.NgoPII, M.Pod15391I | | | | |
| RleAI | CCCAC | M.Bsp14III, M.Bsp3003I, M.Bsp3004I, | GATC | 1, 4 | m5C | GATCCCACANNNNNNNNN[NNN] |
| | A | M.CalB3III, M.CpeAIII, M.Esu35585I, | | | | |
| | | M.FpsJIV, M.Lba2031I, M.Lbo2004I, | | | | |
| | | M.LlaKR2I, M.Lmo1042I, M.Lmo7956II, | | | | |
| | | M.Lsp10393II, M.MspI7I, M.Sau3AI, M.Sba3I, | | | | |
| | | M.Sin395I, M.Spn23FI, M.Sth368I | | | | |
| RleAI | CCCAC | M.BstXI | CCANNNN | 3, 10 | m6A | CCCACANNNNTGGNN[NNN] |
| | A | | NNTGG | | | |
| RleAI | CCCAC | M.CocIII, M.Fsi4947II, M.TdeIII, | GGNCC | 1, 5 | m4C | GGNCCCCACANNNNNNNNN[NNN], |
| | A | M.Tph12270I | | | | GGNCCCACANNNNNNNNN[NNN], |
| | | | | | | GGCCCACANNNNNNNNN[NNN] |
| RleAI | CCCAC | M.CviJI | RGCB | 2, 3 | m5C | VGCCCACANNNNNNNNN[NNN] |
| | A | | | | | |
| RleAI | CCCAC | M.Dac11109II, M.Hfo6591I, M.MhuII, | GTAC | 1, 4 | m4C | GTACCCACANNNNNNNNN[NNN] |
| | A | M.MjaV, M.MlaZII, M.MspLW5I, M.RsaI | | | | |
| RleAI | CCCAC | M.Djo10085II, M.Ssp6803II | GGCC | 2, 3 | Unknown | GGCCCACANNNNNNNNN[NNN] |
| | A | | | | | |
| RleAI | CCCAC | M.EcoO109I | RGGNCCY | 3, 5 | m5C | RGGNCCCACANNNNNNNNN[NNN] |
| | A | | | | | |
| RleAI | CCCAC | M.EcoVIII, M.HindIII, M.Lad60222I, M.LlaCI | AAGCTT | 1, 6 | m6A | CCCACAAGCTTNNNN[NNN] |
| | A | | | | | |
| RleAI | CCCAC | M.Esp1396I | CCANNNN | 3, 9 | m6A | CCCACANNNTGGNNN[NNN] |
| | A | | NTGG | | | |
| RleAI | CCCAC | M.FatI | CATG | 1, 4 | m5C | CCCACATGNNNNNNN[NNN] |
| | A | | | | | |
| RleAI | CCCAC | M.HgiCI | GGYRCC | 2, 5 | m5C | GGYRCCCACANNNNNNNNN[NNN] |
| | A | | | | | |
| RleAI | CCCAC | M.Hpy298II, M.Hpy299II, M.Hpy66II, | ACNGT | 2, 4 | m4C | CCCACAGTNNNNNNN[NNN] |
| | A | M.HpyUM032II, M.HpyUM037II | | | | |
| RleAI | CCCAC | M.HtuII, M.Nas12278II | CATTC | 2 | m6A | CCCACATTCNNNNNN[NNN] |
| | A | | | | | |
| RleAI | CCCAC | M.Mae7806III, M.PspPI, M.Sau96I | GGNCC | 2, 4 | m5C | GGNCCCACANNNNNNNNN[NNN], |
| | A | | | | | GGCCCACANNNNNNNNN[NNN] |
| RleAI | CCCAC | M.MjaII | GGNCC | 1, 5 | m5C | GGNCCCCACANNNNNNNNN[NNN], |
| | A | | | | | GGNCCCACANNNNNNNNN[NNN], |
| | | | | | | GGCCCACANNNNNNNNN[NNN] |
| RleAI | CCCAC | M.MpeII | RGCY | 2, 3 | m5C | RGCCCACANNNNNNNNN[NNN] |
| | A | | | | | |
| RleAI | CCCAC | M.NgoAXV, M.NgoMV | GGNNCC | 2, 5 | m5C | GGNNCCCACANNNNNNNNN[NNN], |
| | A | | | | | GGNCCCACANNNNNNNNN[NNN] |
| RleAI | CCCAC | M.NheI | GCTAGC | 1, 6 | m4C | GCTAGCCCACANNNNNNNNN[NNN] |
| | A | | | | | |
| RleAI | CCCAC | M.NspI, M.NspHI | RCATGY | 2, 5 | m5C | CCCACATGYNNNNNN[NNN] |
| | A | | | | | |
| RleAI | CCCAC | M.Psp737I | CCCCCD | 4 | m4C | CCCCCACANNNNNNNNN[NNN] |
| | A | | | | | |
| RleAI | CCCAC | M.SbaUII | CAGCTG | 2, 5 | m6A | CCCACAGCTGNNNNN[NNN] |
| | A | | | | | |
| RleAI | CCCAC | M.SuaII | RGATCY | 2, 5 | m5C | RGATCCCACANNNNNNNNN[NNN] |
| | A | | | | | |
| RleAI | CCCAC | M.TspRI | CASTG | 1, 5 | m5C | CCCACASTGNNNNNN[NNN] |
| | A | | | | | |
| RleAI | CCCAC | M1.CspNS6II | TCCGCC | 5 | m5C | TCCGCCCACANNNNNNNNN[NNN] |
| | A | | | | | |
| RleAI | CCCAC | M2.BstF5I | CATCC | 2 | m6A | CCCACATCCNNNNNN[NNN] |
| | A | | | | | |
| RleAI | CCCAC | M4.BstF5I, M1.Cin755I, M2.Cin755I, | CATCC | 2, 3 | m6A | CCCACATCCNNNNNN[NNN] |
| | A | M1.CmeSR3I, M2.CmeSR3I, M1.Csp12AI, | | | | |
| | | M1.Csp323I, M2.Csp323I, M1.Csp410I, | | | | |
| | | M2.Csp410I, M.FokI, M1.Msp315I, | | | | |
| | | M2.Msp315I, M.Sau13435I, M.StsI, | | | | |
| | | M1.Tsu2489IV, M2.Tsu2489IV, | | | | |
| | | M3.Tsu2489IV | | | | |
| AarI | CACCT | M.AbaBs12I, M.Awo1030I, M.Cdu23823I, | CCWGG | 1, 5 | m5C | CACCTGCCWGG[NNNN] |
| | GC | M.Csa8155II, M.Cun9529I, M.EasL1Dcm, | | | | |
| | | M.Eba57Dcm, M.Ecl34399Dcm, | | | | |
| | | M.Eco12761Dcm, M.Eco3609Dcm, | | | | |
| | | M.Eco4255Dcm, M.EcoVR50Dcm, | | | | |
| | | M.EsaSP1II, M.Kpn34618Dcm, | | | | |
| | | M.Kpn38547Dcm, M.Kpn39I, M.Kpn43816I, | | | | |
| | | M.Kpn677ORFDcm, M.Kpn928Dcm, | | | | |
| | | M.KpnNIH1Dcm, M.KpnNIH10Dcm, | | | | |
| | | M.KpnNIH30Dcm, M.Kva120Dcm, M.Lsp48I, | | | | |
| | | M.Pmi1I, M.SpaD2III, M.SplRp8II, | | | | |
| | | M.SptADcm, M.Tsu2489III | | | | |
| AarI | CACCT | M.Acc65VI, M.SenAZIII | CTKMAG | 2, 5 | m6A | CACCTGCAGNN[NNNN] |
| | GC | | | | | |
| AarI | CACCT | M.AciI | CCGC | 1, 3 | m5C | CACCTGCGGNN[NNNN], |
| | GC | | | | | CACCTGCCGCN[NNNN] |
| AarI | CACCT | M.Ade56712I, M.Asp588III, M.AveCB51II, | CTGCAG | 2, 5 | m6A | CACCTGCAGNN[NNNN] |
| | GC | M.BbrUIII, M.Blo30698I, M.BsuBI, | | | | |
| | | M.CpaYL7III, M.Dba7044I, M.Dfa45958II, | | | | |
| | | M.Eco12581I, M.Eco2012I, M.EcoGIII, | | | | |
| | | M.EcoG089I, M.Eho16691II, M.Hal5920II, | | | | |
| | | M.Lsp6406II, M.MspNR41II, M.Pae490I, | | | | |
| | | M.Pox23570I, M.PstI, M.RpaII, M.Sca3403II, | | | | |
| | | M.Tsp61I, M.XmnII, M.YenWI, M.YinY228I | | | | |
| AarI | CACCT | M.AplI | CTGCAG | 3, 4 | m5C | CACCTGCAGNN[NNNN] |
| | GC | | | | | |
| AarI | CACCT | M.AvaIX, M.Cfr10I, M.Nme18VI, M.VchAI, | RCCGGY | 2, 5 | m5C | CACCTGCCGGY[NNNN] |
| | GC | M.Vch0395I | | | | |
| AarI | CACCT | M.AvaV, M.SliSI | GATC | 1, 4 | m4C | GATCACCTGCNNNN[NNNN] |
| | GC | | | | | |
| AarI | CACCT | M.BamWS8I, M.CthV, M.EfaRFI, M.Saf8902II, | GCWGC | 2, 4 | m5C | CACCTGCWGCN[NNNN] |
| | GC | M.TacII, M.TcoKWC4III | | | | |
| AarI | CACCT | M.BbvI, M.BceSIV | GCAGC | 2, 4 | m5C | CACCTGCTGCN[NNNN], |
| | GC | | | | | CACCTGCAGCN[NNNN] |
| AarI | CACCT | M.BceSII | GGWCC | 1, 5 | m5C | GGWCCACCTGCNNNN[NNNN] |
| | GC | | | | | |
| AarI | CACCT | M.BepI, M.FpsJV, M.Gel16401III, M.Pdi8503I | CGCG | 1, 4 | m5C | CACCTGCGCGN[NNNN] |
| | GC | | | | | |
| AarI | CACCT | M.Bsp14III, M.Bsp3003I, M.Bsp3004I, | GATC | 1, 4 | m5C | GATCACCTGCNNNN[NNNN] |
| | GC | M.CalB3III, M.CpeAIII, M.Esu35585I, | | | | |
| | | M.FpsJIV, M.Lba2031I, M.Lbo2004I, | | | | |
| | | M.LlaKR2I, M.Lmo1042I, M.Lmo7956II, | | | | |
| | | M.Lsp10393II, M.MspI7I, M.Sau3AI, M.Sba3I, | | | | |
| | | M.Sin395I, M.Spn23FI, M.Sth368I | | | | |
| AarI | CACCT | M.BspRAC04I, M.EcaI, M.Eco3936IV | GGTNACC | 3, 5 | m6A | GGTCACCTGCNNNN[NNNN] |
| | GC | | | | | |
| AarI | CACCT | M.BstXI | CCANNNN | 3, 10 | m6A | CCACCTGCNTGG[NNNN] |
| | GC | | NNTGG | | | |
| AarI | CACCT | M.BsuFI, M.CpeAIV, M.MspI | CCGG | 1, 4 | m5C | CACCTGCCGGN[NNNN] |
| | GC | | | | | |
| AarI | CACCT | M.Cab13497I, M.Dac11109III, M.Dco13527I, | CTAG | 1, 4 | m4C | CACCTGCTAGN[NNNN] |
| | GC | M.Djo10085I, M.Hbo11551I, M.Hka19301III, | | | | |
| | | M.Hme33500I, M.HsaR1I, M.Hsi33800I, | | | | |
| | | M.Hsp KM1WII, M.HspNII, M.HtuI, M.HvoDSI, | | | | |
| | | M.Lba2029II, M.Mbo45II, M.MjaI, M.MthZI, | | | | |
| | | M.Nas12278I, M.Rfl3010I, M.SsmMI | | | | |
| AarI | CACCT | M.Cac8I | GCNNGC | 2, 5 | m5C | CACCTGCNNGC[NNNN] |
| | GC | | | | | |
| AarI | CACCT | M.Cdi630IV, M.Ckr177III, M.CmaLM2II, | GCNGC | 2, 4 | m5C | CACCTGCNGCN[NNNN] |
| | GC | M.CocII, M.Fnu4HI, M.Fsp4HI | | | | |
| AarI | CACCT | M.Cmu51329I, M.EcoJA03PDcm, | CCWGG | 1, 5 | Unkno | CACCTGCCWGG[NNNN] |
| | GC | M.RorR1Dcm, M.Sen8391Dcm, M.ZalSM2II | | | wn | |
| AarI | CACCT | M.CocIII, M.Fsi4947II, M.TdeIII, | GGNCC | 1, 5 | m4C | GGNCCACCTGCNNNN[NNNN] |
| | GC | M.Tph12270I | | | | |
| AarI | CACCT | M.CsiFSMII, M.MfoCT6IV, M.NgoAIV, | GCCGGC | 2, 5 | m5C | CACCTGCCGGC[NNNN] |
| | GC | M.NgoMIV, M1.Sgr13350II | | | | |
| AarI | CACCT | M.CviRI, M.Hpy298VIII, M.Hpy299VIII, | TGCA | 1, 4 | m6A | TGCACCTGCNNNN[NNNN], |
| | GC | M.Hpy30VI, M.Hpy32V, M.Hpy57II, | | | | CACCTGCANNN[NNNN] |
| | | M.Hpy66VIII, M.HpyFVI, M.HpyUM032VIII, | | | | |
| | | M.HpyUM037VIII | | | | |
| AarI | CACCT | M.Dac11109II, M.Hfo6591I, M.MhuII, | GTAC | 1, 4 | m4C | GTACACCTGCNNNN[NNNN] |
| | GC | M.MjaV, M.MlaZII, M.MspLW5I, M.RsaI | | | | |
| AarI | CACCT | M.DdeI | CTNAG | 1, 5 | m5C | CACCTGCTNAG[NNNN] |
| | GC | | | | | |
| AarI | CACCT | M.DfeI, M.Fnu419II, M.Pen113II | CTNNAG | 2, 5 | m6A | CACCTGCAGNN[NNNN] |
| | GC | | | | | |
| AarI | CACCT | M.Esp1396I | CCANNNN | 3, 9 | m6A | CCACCTGCTGGN[NNNN] |
| | GC | | NTGG | | | |
| AarI | CACCT | M.FatI | CATG | 1, 4 | m5C | CACCTGCATGN[NNNN] |
| | GC | | | | | |
| AarI | CACCT | M.FisAW1I, M.ThaI, M.Tph12270II | CGCG | 1, 4 | m4C | CACCTGCGCGN[NNNN] |
| | GC | | | | | |
| AarI | CACCT | M.FnoB1II, M.Hal24586I, M.Hpy298V, | CCGG | 1, 4 | m4C | CACCTGCCGGN[NNNN] |
| | GC | M.Hpy299IX, M.Hpy30V, M.Hpy32XI, | | | | |
| | | M.Hpy57V, M.Hpy66IX, M.Hpy99VIII, | | | | |
| | | M.HpyFV, M.HpyUM032IX, M.HpyUM037IX, | | | | |
| | | M.MjaVI, M.PspJDRI, M.TmeBII | | | | |
| AarI | CACCT | M.HgiCI | GGYRCC | 2, 5 | m5C | GGCACCTGCNNNN[NNNN] |
| | GC | | | | | |
| AarI | CACCT | M.HhaI, M.HinP1I, M.Hpy99III, M.HpyAVIII, | GCGC | 2, 3 | m5C | CACCTGCGCNN[NNNN] |
| | GC | M.HpyUM032XV | | | | |
| AarI | CACCT | M.Hme33500II | HGCWGCK | 3 | m4C | CACCTGCWGCK[NNNN] |
| | GC | | | | | |
| AarI | CACCT | M.Hpy30IX, M.Hpy32IX, M.Hpy57IX, | GTNNAC | 2, 5 | m6A | GTNCACCTGCNNNN[NNNN] |
| | GC | M.Hpy66XIII, M.Hpy8I, M.HpyFIX, | | | | |
| | | M.HpyUM032XI, M.HpyUM037V, M.MjaIV, | | | | |
| | | M.MspRAC08II | | | | |
| AarI | CACCT | M.Hpy30X, M.Hpy57VIII, M.HpyFXI, M.MhuI | CTNAG | 1, 5 | m4C | CACCTGCTNAG[NNNN] |
| | GC | | | | | |
| AarI | CACCT | M.Hpy57X | CTRYAG | 2, 5 | m6A | CACCTGCAGNN[NNNN] |
| | GC | | | | | |
| AarI | CACCT | M.Hpy99II, M.Tsp45I, M.Tsu2489II | GTSAC | 2, 4 | m6A | GTCACCTGCNNNN[NNNN] |
| | GC | | | | | |
| AarI | CACCT | M.HpyD27I | CCTC | 1, 3 | m5C, | CACCTGCCTCN[NNNN] |
| | GC | | | | m6A | |
| AarI | CACCT | M.MjaII | GGNCC | 1, 5 | m5C | GGNCCACCTGCNNNN[NNNN] |
| | GC | | | | | |
| AarI | CACCT | M.Msp1II | CCTGG | 1 | m4C | CACCTGCCTGG[NNNN] |
| | GC | | | | | |
| AarI | CACCT | M.Msp42II | CCWGG | 1, 5 | m4C | CACCTGCCWGG[NNNN] |
| | GC | | | | | |
| AarI | CACCT | M.NgoAXV, M.NgoMV | GGNNCC | 2, 5 | m5C | GGCACCTGCNNNN[NNNN] |
| | GC | | | | | |
| AarI | CACCT | M.NheI | GCTAGC | 1, 6 | m4C | GCTAGCACCTGCNNNN[NNNN], |
| | GC | | | | | CACCTGCTAGC[NNNN] |
| AarI | CACCT | M.Nme18V | GCGCGC | 2, 5 | m5C | CACCTGCGCGC[NNNN] |
| | GC | | | | | |
| AarI | CACCT | M.NmeDI | VCCGGY | 2, 5 | m5C | CACCTGCCGGB[NNNN] |
| | GC | | | | | |
| AarI | CACCT | M.NmeMC58III | CCAGA | 1 | m5C | CACCTGCCAGA[NNNN] |
| | GC | | | | | |
| AarI | CACCT | M.NspI, M.NspHI | RCATGY | 2, 5 | m5C | CACCTGCATGY [NNNN] |
| | GC | | | | | |
| AarI | CACCT | M.Pla5I | CTAG | 1, 4 | Unknown | CACCTGCTAGN[NNNN] |
| | GC | | | | | |
| AarI | CACCT | M.SonIII | GACNNNN | 2, 8 | m6A | GACCACCTGCNNNN[NNNN] |
| | GC | | TGC | | | |
| AarI | CACCT | M.TspRI | CASTG | 1, 5 | m5C | CACCTGCASTG[NNNN] |
| | GC | | | | | |
| AarI | CACCT | M.Yen2516I | GCGCGC | 2, 5 | Unknown | CACCTGCGCGC[NNNN] |
| | GC | | | | | |
| AarI | CACCT | M1.AgoG2I, M2.AgoG2I | CCAGT | 1, 4 | m4C | CACCTGCCAGT[NNNN] |
| | GC | | | | | |
| AarI | CACCT | M1.BspACI | CCGC | 1 | m5C | CACCTGCCGCN[NNNN] |
| | GC | | | | | |
| AarI | CACCT | M1.HgaI, M2.LlaJI | GCGTC | 2 | m5C | CACCTGCGTCN[NNNN] |
| | GC | | | | | |
| AarI | CACCT | M1.HphI | TCACC | 2 | m5C | TCACCTGCNNNN[NNNN] |
| | GC | | | | | |
| AarI | CACCT | M1.LplAG30I | CCTTC | 1 | m5C | CACCTGCCTTC[NNNN] |
| | GC | | | | | |
| AarI | CACCT | M2.BceSIII, M1.Pru9I, M2.Pru9I | GCCGT | 2, 4 | m4C | CACCTGCCGTN[NNNN] |
| | GC | | | | | |
| AarI | CACCT | M2.HpyAVI, M1.MnlI | CCTC | 1 | m5C | CACCTGCCTCN[NNNN] |
| | GC | | | | | |
| BspQI, LguI, PciSI, | GCTCT | M.AbaBs12I, M.Awo1030I, M.Cdu23823I, | CCWGG | 1, 5 | m5C | CCWGGCTCTTCN[NNN] |
| SapI, VpaK32I | TC | M.Csa8155II, M.Cun9529I, M.EasL1Dcm, | | | | |
| | | M.Eba57Dcm, M.Ec134399Dcm, | | | | |
| | | M.Eco12761Dcm, M.Eco3609Dcm, | | | | |
| | | M.Eco4255Dcm, M.EcoVR50Dcm, | | | | |
| | | M.EsaSP1II, M.Kpn34618Dcm, | | | | |
| | | M.Kpn38547Dcm, M.Kpn39I, M.Kpn43816I, | | | | |
| | | M.Kpn677ORFDcm, M.Kpn928Dcm, | | | | |
| | | M.KpnNIH1Dcm, M.KpnNIH10Dcm, | | | | |
| | | M.KpnNIH30Dcm, M.Kva120Dcm, M.Lsp48I, | | | | |
| | | M.Pmi1I, M.SpaD2III, M.SplRp8II, | | | | |
| | | M.SptADcm, M.Tsu2489III | | | | |
| BspQI, LguI, PciSI, | GCTCT | M.AciI | CCGC | 1, 3 | m5C | GCGGCTCTTCN[NNN], CCGCTCTTCN[NNN] |
| SapI, VpaK32I | TC | | | | | |
| BspQI, LguI, PciSI, | GCTCT | M.AluBI | AGCT | 1, 4 | m6A | AGCTCTTCN[NNN] |
| SapI, VpaK32I | TC | | | | | |
| BspQI, LguI, PciSI, | GCTCT | M.AluI, M.CspCY2I | AGCT | 2, 3 | m5C | AGCTCTTCN[NNN] |
| SapI, VpaK32I | TC | | | | | |
| BspQI, LguI, PciSI, | GCTCT | M.Ama55I, M.CnaPQ2III, M.Rmo1926II, | CGGCCG | 1, 6 | m5C | CGGCCGCTCTTCN[NNN] |
| SapI, VpaK32I | TC | M.SenC1765IV, M.SspG1I, M.XorPXII | | | | |
| BspQI, LguI, PciSI, | GCTCT | M.AquI | CYCGRG | 1, 6 | m5C | CYCGRGCTCTTCN[NNN] |
| SapI, VpaK32I | TC | | | | | |
| BspQI, LguI, PciSI, | GCTCT | M.AsiSI | GCGATCGC | 2, 7 | m5C | GCGATCGCTCTTCN[NNN] |
| SapI, VpaK32I | TC | | | | | |
| BspQI, LguI, PciSI, | GCTCT | M.AspJHL3I, M2.Psp32OWII | GAGCTC | 3, 4 | m4C | GAGCTCTTCN[NNN] |
| SapI, VpaK32I | TC | | | | | |
| BspQI, LguI, PciSI, | GCTCT | M.AvaIX, M.Cfr10I, M.Nme18VI, M.VchAI, | RCCGGY | 2, 5 | m5C | RCCGGCTCTTCN[NNN] |
| SapI, VpaK32I | TC | M.Vch0395I | | | | |
| BspQI, LguI, PciSI, | GCTCT | M.BamWS8I, M.CthV, M.EfaRFI, M.Saf8902II, | GCWGC | 2, 4 | m5C | GCWGCTCTTCN[NNN] |
| SapI, VpaK32I | TC | M.TacII, M.TcoKWC4III | | | | |
| BspQI, LguI, PciSI, | GCTCT | M.BanII, M.EcoT38I | GRGCYC | 3, 4 | m5C | GRGCTCTTCN[NNN] |
| SapI, VpaK32I | TC | | | | | |
| BspQI, LguI, PciSI, | GCTCT | M.BbvI, M.BceSIV | GCAGC | 2, 4 | m5C | GCTGCTCTTCN[NNN], |
| SapI, VpaK32I | TC | | | | | GCAGCTCTTCN[NNN] |
| BspQI, LguI, PciSI, | GCTCT | M.BcoSlacII, M.MspLW5III, M.Nbr128I, | CTCGAG | 1, 6 | m4C | CTCGAGCTCTTCN[NNN] |
| SapI, VpaK32I | TC | M.Psy18884II, M.Tam77409II, M.TbrGE1II, | | | | |
| | | M.TpaRLII | | | | |
| BspQI, LguI, PciSI, | GCTCT | M.BepI, M.FpsJV, M.Gel16401III, M.Pdi8503I | CGCG | 1, 4 | m5C | CGCGCTCTTCN[NNN] |
| SapI, VpaK32I | TC | | | | | |
| BspQI, LguI, PciSI, | GCTCT | M.BglI, M.CagI, M.DdeVCDI, M.GsuRed1I | GCCNNNN | 2, 10 | m4C | GCCNNNNNGGCTCTTCN[NNN] |
| SapI, VpaK32I | TC | | NGGC | | | |
| BspQI, LguI, PciSI, | GCTCT | M.Ble402III, M.Psp10HI | SAGCTS | 3, 4 | m4C | SAGCTCTTCN[NNN] |
| SapI, VpaK32I | TC | | | | | |
| BspQI, LguI, PciSI, | GCTCT | M.BsoBI | CYCGRG | 1, 6 | m4C | CYCGRGCTCTTCN[NNN] |
| SapI, VpaK32I | TC | | | | | |
| BspQI, LguI, PciSI, | GCTCT | M.BsuFI, M.CpeAIV, M.MspI | CCGG | 1, 4 | m5C | CCGGCTCTTCN[NNN] |
| SapI, VpaK32I | TC | | | | | |
| BspQI, LguI, PciSI, | GCTCT | M.Cab13497I, M.Dac11109III, M.Dco13527I, | CTAG | 1, 4 | m4C | CTAGCTCTTCN[NNN] |
| SapI, VpaK32I | TC | M.Djo10085I, M.Hbo11551I, M.Hka19301III, | | | | |
| | | M.Hme33500I, M.HsaR1I, M.Hsi33800I, | | | | |
| | | M.HspKM1WII, M.HspNII, M.HtuI, M.HvoDSI, | | | | |
| | | M.Lba2029II, M.Mbo45II, M.MjaI, M.MthZI, | | | | |
| | | M.Nas12278I, M.Rfl3010I, M.SsmMI | | | | |
| BspQI, LguI, PciSI, | GCTCT | M.Cac8I | GCNNGC | 2, 5 | m5C | GCNNGCTCTTCN[NNN] |
| SapI, VpaK32I | TC | | | | | |
| BspQI, LguI, PciSI, | GCTCT | M.Cdi630IV, M.Ckr177III, M.CmaLM2II, | GCNGC | 2, 4 | m5C | GCNGCTCTTCN[NNN] |
| SapI, VpaK32I | TC | M.CocII, M.Fnu4HI, M.Fsp4HI | | | | |
| BspQI, LguI, PciSI, | GCTCT | M.CfrBI, M.Sen1735IV, M.SenAnaIV | CCWWGG | 1, 6 | m4C | CCWWGGCTCTTCN[NNN] |
| SapI, VpaK32I | TC | | | | | |
| BspQI, LguI, PciSI, | GCTCT | M.Cmu51329I, M.EcoJA03PDcm, | CCWGG | 1, 5 | Unknown | CCWGGCTCTTCN[NNN] |
| SapI, VpaK32I | TC | M.RorR1Dcm, M.Sen8391Dcm, M.ZalSM2II | | | | |
| BspQI, LguI, PciSI, | GCTCT | M.CsiFSMII, M.MfoCT6IV, M.NgoAIV, | GCCGGC | 2, 5 | m5C | GCCGGCTCTTCN[NNN] |
| SapI, VpaK32I | TC | M.NgoMIV, M1.Sgr13350II | | | | |
| BspQI, LguI, PciSI, | GCTCT | M.CviJI | RGCB | 2, 3 | m5C | VGCTCTTCN[NNN] |
| SapI, VpaK32I | TC | | | | | |
| BspQI, LguI, PciSI, | GCTCT | M.DdeI | CTNAG | 1, 5 | m5C | CTNAGCTCTTCN[NNN] |
| SapI, VpaK32I | TC | | | | | |
| BspQI, LguI, PciSI, | GCTCT | M.FatI | CATG | 1, 4 | m5C | CATGCTCTTCN[NNN] |
| SapI, VpaK32I | TC | | | | | |
| BspQI, LguI, PciSI, | GCTCT | M.FisAW1I, M.ThaI, M.Tph12270II | CGCG | 1, 4 | m4C | CGCGCTCTTCN[NNN] |
| SapI, VpaK32I | TC | | | | | |
| BspQI, LguI, PciSI, | GCTCT | M.FnoB1II, M.Hal24586I, M.Hpy298V, | CCGG | 1, 4 | m4C | CCGGCTCTTCN[NNN] |
| SapI, VpaK32I | TC | M.Hpy299IX, M.Hpy30V, M.Hpy32XI, | | | | |
| | | M.Hpy57V, M.Hpy66IX, M.Hpy99VIII, | | | | |
| | | M.HpyFV, M.HpyUM032IX, M.HpyUM037IX, | | | | |
| | | M.MjaVI, M.PspJDRI, M.TmeBII | | | | |
| BspQI, LguI, PciSI, | GCTCT | M.HhaI, M.HinP1I, M.Hpy9911I, M.HpyAVIII, | GCGC | 2, 3 | m5C | GCGCTCTTCN[NNN] |
| SapI, VpaK32I | TC | M.HpyUM032XV | | | | |
| BspQI, LguI, PciSI, | GCTCT | M.Hme33500II | MGCWGCD | 5 | m4C | MGCWGCTCTTCN[NNN] |
| SapI, VpaK32I | TC | | | | | |
| BspQI, LguI, PciSI, | GCTCT | M.Hpy30X, M.Hpy57VIII, M.HpyFXI, M.MhuI | CTNAG | 1, 5 | m4C | CTNAGCTCTTCN[NNN] |
| SapI, VpaK32I | TC | | | | | |
| BspQI, LguI, PciSI, | GCTCT | M.Hpy99IV, M.HpyFORFX | CCNNGG | 1, 6 | m4C | CCNNGGCTCTTCN[NNN] |
| SapI, VpaK32I | TC | | | | | |
| BspQI, LguI, PciSI, | GCTCT | M.HpyD27I | GAGG | 2, 4 | m6A, | GAGGCTCTTCN[NNN] |
| SapI, VpaK32I | TC | | | | m5C | |
| BspQI, LguI, PciSI, | GCTCT | M.Mma5219II, M.TarMY3I | AGCT | 2, 3 | m4C | AGCTCTTCN[NNN] |
| SapI, VpaK32I | TC | | | | | |
| BspQI, LguI, PciSI, | GCTCT | M.MpeII | RGCY | 2, 3 | m5C | RGCTCTTCN[NNN] |
| SapI, VpaK32I | TC | | | | | |
| BspQI, LguI, PciSI, | GCTCT | M.Msp1II | CCAGG | 5 | m4C | CCAGGCTCTTCN[NNN] |
| SapI, VpaK32I | TC | | | | | |
| BspQI, LguI, PciSI, | GCTCT | M.Msp42II | CCWGG | 1, 5 | m4C | CCWGGCTCTTCN[NNN] |
| SapI, VpaK32I | TC | | | | | |
| BspQI, LguI, PciSI, | GCTCT | M.NgoAI | RGCGCY | 3, 4 | m5C | RGCGCTCTTCN[NNN] |
| SapI, VpaK32I | TC | | | | | |
| BspQI, LguI, PciSI, | GCTCT | M.NheI | GCTAGC | 1, 6 | m4C | GCTAGCTCTTCN[NNN] |
| SapI, VpaK32I | TC | | | | | |
| BspQI, LguI, PciSI, | GCTCT | M.Nme18V | GCGCGC | 2, 5 | m5C | GCGCGCTCTTCN[NNN] |
| SapI, VpaK32I | TC | | | | | |
| BspQI, LguI, PciSI, | GCTCT | M.NmeDI | VCCGGY | 2, 5 | m5C | VCCGGCTCTTCN[NNN] |
| SapI, VpaK32I | TC | | | | | |
| BspQI, LguI, PciSI, | GCTCT | M.NmeMC58III | TCTGG | 5 | m5C | TCTGGCTCTTCN[NNN] |
| SapI, VpaK32I | TC | | | | | |
| BspQI, LguI, PciSI, | GCTCT | M.Nsp209III, M.Nsp51109II | CTCGAG | 1, 6 | m5C | CTCGAGCTCTTCN[NNN] |
| SapI, VpaK32I | TC | | | | | |
| BspQI, LguI, PciSI, | GCTCT | M.NspI, M.NspHI | RCATGY | 2, 5 | m5C | RCATGCTCTTCN[NNN] |
| SapI, VpaK32I | TC | | | | | |
| BspQI, LguI, PciSI, | GCTCT | M.Pae10332II, M1.Pae50071I, | CAGCTC | 3, 4 | m4C | CAGCTCTTCN[NNN] |
| SapI, VpaK32I | TC | M2.Pae50071I | | | | |
| BspQI, LguI, PciSI, | GCTCT | M.Pam7686I | CCATGG | 1, 6 | m5C | CCATGGCTCTTCN[NNN] |
| SapI, VpaK32I | TC | | | | | |
| BspQI, LguI, PciSI, | GCTCT | M.Pfa23572II | CGATCG | 1, 6 | m5C | CGATCGCTCTTCN[NNN] |
| SapI, VpaK32I | TC | | | | | |
| BspQI, LguI, PciSI, | GCTCT | M.Pla5I | CTAG | 1, 4 | Unknown | CTAGCTCTTCN[NNN] |
| SapI, VpaK32I | TC | | | | | |
| BspQI, LguI, PciSI, | GCTCT | M.SacI, M.Sgr13350I | GAGCTC | 3, 4 | m5C | GAGCTCTTCN[NNN] |
| SapI, VpaK32I | TC | | | | | |
| BspQI, LguI, PciSI, | GCTCT | M.Sam53668II | CCATGG | 1, 6 | Unknown | CCATGGCTCTTCN[NNN] |
| SapI, VpaK32I | TC | | | | | |
| BspQI, LguI, PciSI, | GCTCT | M.Sen1781III | CCWWGG | 1, 6 | Unknown | CCWWGGCTCTTCN[NNN] |
| SapI, VpaK32I | TC | | | | | |
| BspQI, LguI, PciSI, | GCTCT | M.Tam77409IV | CCRCTC | 4 | m4C | CCGCTCTTCN[NNN] |
| SapI, VpaK32I | TC | | | | | |
| BspQI, LguI, PciSI, | GCTCT | M.TspRI | CASTG | 1, 5 | m5C | CASTGCTCTTCN[NNN] |
| SapI, VpaK32I | TC | | | | | |
| BspQI, LguI, PciSI, | GCTCT | M.XmnI | GAANNNN | 2, 9 | m6A | GAAGCTCTTCN[NNN] |
| SapI, VpaK32I | TC | | TTC | | | |
| BspQI, LguI, PciSI, | GCTCT | M.Yen2516I | GCGCGC | 2, 5 | Unknown | GCGCGCTCTTCN[NNN] |
| SapI, VpaK32I | TC | | | | | |
| BspQI, LguI, PciSI, | GCTCT | M1.AgoG2I, M2.AgoG2I | ACTGG | 2, 5 | m4C | ACTGGCTCTTCN[NNN] |
| SapI, VpaK32I | TC | | | | | |
| BspQI, LguI, PciSI, | GCTCT | M1.BspACI | GCGG | 4 | m5C | GCGGCTCTTCN[NNN] |
| SapI, VpaK32I | TC | | | | | |
| BspQI, LguI, PciSI, | GCTCT | M1.HgaI, M2.LlaJI | GACGC | 4 | m5C | GACGCTCTTCN[NNN] |
| SapI, VpaK32I | TC | | | | | |
| BspQI, LguI, PciSI, | GCTCT | M1.LplAG30I | GAAGG | 5 | m5C | GAAGGCTCTTCN[NNN] |
| SapI, VpaK32I | TC | | | | | |
| BspQI, LguI, PciSI, | GCTCT | M2.BceSIII, M1.Pru9I, M2.Pru9I | ACGGC | 2, 4 | m4C | ACGGCTCTTCN[NNN] |
| SapI, VpaK32I | TC | | | | | |
| BspQI, LguI, PciSI, | GCTCT | M2.HpyAVI, M1.MnlI | GAGG | 4 | m5C | GAGGCTCTTCN[NNN] |
| SapI, VpaK32I | TC | | | | | |

### Use of Other Types of Methyltransferases

[0210] Despite using type II DNA methlyase enzymes in the examples, type I restriction-modification enzymes may also be considered. Type I restriction-modification enzymes are multi-subunit enzymes that have both methyltransferase and restriction endonuclease activity. They are usually consists of three types of subunits encoded by three different genes: methylation subunit, restriction subunit and DNA sequence-recognition subunit (specificity subunit). Both the methylation subunit and specificity subunit are required for methyltransferase activity.

[0211] For example, M.EcoCI5I is known to recognize GACNNNNNNRTAAY (methylated base/opposite base in bold, reverse complementary RTTAYNNNNNNGTC). A methylation-protectable restriction site according to the invention could be provided using this sequence to protect an overlapping BsaI site: RTTAYNNNNNGGTCTC (methylated base/opposite base in bold, BsaI recognition sequence underlined, M.EcoCI5I recognition sequence in italic). An E. coli strain expressing both the methylation subunit M.EcoCI5I and the specificity subunit S.EcoCI5I may be able to methylate the corresponding bases in the cut control element, which would block the methylation-protected BsaI site.

[0212] Table 4 provides some further example restriction enzyme and type I restriction-modification enzyme combinations, or recognition sequences thereof, that may be provided in accordance with the invention. The skilled person will understand that these are examples and not an exhaustive list of potential combinations that would be encompassed by the claims.

TABLE 4

| | | Type I | | Posi- | | |
|---|---|---|---|---|---|---|
| | | restric- | | tion | | |
| | | tion- | | of | | Overlapping |
| Restric- | Restric- | modifi- | | methyl- | Type of | methylation/ |
| tion | tion | cation | Methylation | ated | methyl- | restriction |
| enzyme | site | enzyme | sequence | base | ation | site |
| AlwXI, | GCAG | M.AspU | GGCANNNN | 4, 11 | m6A | GGCAGCNNNNTGAN |
| BbvI, | C | 41III | NNTGA | | | [NNNN] |
| BseKI, | | | | | | |
| BseXI, | | | | | | |
| Bsp42 | | | | | | |
| 3I, | | | | | | |
| Bst12I, | | | | | | |
| Bst71I, | | | | | | |
| BstV1I, | | | | | | |
| GeolCI, | | | | | | |
| Lsp11 | | | | | | |
| 09I | | | | | | |
| AlwXI, | GCAG | M.Sth3 | GCANNNNN | 3, 11 | m6A | GCAGCNNNNNTCG |
| BbvI, | C | 01I | NNTCG | | | [NNNN] |
| BseKI, | | | | | | |
| BseXI, | | | | | | |
| Bsp42 | | | | | | |
| 3I, | | | | | | |
| Bst12I, | | | | | | |
| Bst71I, | | | | | | |
| BstV1I, | | | | | | |
| GeolCI, | | | | | | |
| Lsp11 | | | | | | |
| 09I | | | | | | |
| StsI | GGAT | M.Bme | GAGNNNNN | 2, 11 | m6A | GAGNNNNGGATGGNNNNN |
| | G | D34I | NNTGG | | | NNNN[NNNN] |
| BpmI, | CTGGA | M.Cba1 | GAGNNNNN | 2, 10 | m6A | CTGGAGNNNNNRTGTNNN |
| GsuI | G | 31 | RTGT | | | NN[NN] |
| BsmBI, | CGTCT | M.SmaF | CAYNNNNNN | 2, 10 | m6A | CAYNNCGTCTCA[NNNN] |
| BstGZ | C | 1I | TCA | | | |
| 53I, | | | | | | |
| Esp3I | | | | | | |
| RdeGB | ACCCA | M.Lal21 | CCAANNNNN | 4, 13 | m6A | GCACCCAGNNNTTGGNNN |
| II | G | 61 | NNNTGC | | | NNNNNNNN[NN], |
| | | | | | | CCAACCCAGNNNTGCNNNN |
| | | | | | | NNNNNNNN[NN] |

### Example Vector Sequences

[0213] The sequences of plasmids for scarless Metclo are listed below in fasta format. The underlined sequence is the “discard sequence” containing the LacZ selection fragment and a replication origin for high copy vector DNA preparation. The [symbol] is the “recessive/truncating composite element” that contains a “methylation-protectable element” and a “nonprotectable element” arranged head-to-head at appropriate distance for adapter switching. The rest of the sequence is the vector backbone containing a low copy replication origin (p15A based) and a selection marker (either kanamycin or spectinomycin).

[0214] For BsaI/M.Osp807II based scarless Metclo, the plasmids are:

$$pMXLK\_VL , pMXLK\_VM , pMXLK\_VR ( kanamycin ) \\ pMXLS\_VL , pMXLS\_VM , pMXLS\_VR ( spectinomycin )$$

[0215] For LguI/M.XmnI based scarless Metclo, the plasmids are:

$$pMZLK\_VL , pMZLK\_VM , pMZLK\_VR ( kanamycin ) \\ pMZLS\_VL , pMZLS\_VM , pMZLS\_VR ( spectinomycin )$$

[0216] The sequences of plasmids for standard 4-fragment assembly of 1 kb DNA and 2-stage assembly of ˜200 kb DNA from 28 fragments are listed in fasta format as well. The underlined sequence for 1 kb assembly vectors contain LacZ selection marker. The underlined sequence for 200 kb assembly vectors contain LacZ selection marker and a replication origin for high copy vector DNA preparation. The rest of the sequences are vector backbones.

[0217] For 1 kb assembly, the plasmids are:

$$pMXP\_A4E , pMYP\_A5E , pMZP\_P6T$$

[0218] For 200 kb assembly, the plasmids are:

$$pMXBG\_A7I , pMXBG\_I7G , pMXBG\_G7F , pMXBG\_F7E , \\ pMXBK\_A7E$$

[0219] Such vector sequences are applicable for the vectors of the examples of the invention, with the specific truncating, maintained or insertional composite elements exchanged as appropriate. A skilled person familiar with molecular cloning can re-construct the vectors herein by PCR from the commercially available Moclo kit.

>pMXLK_VL
(SEQ ID NO: 28)

[chemical structure]

GTCAGACCAAGTTTACTCAT
ATATACTTTAGATTGATTTAAAACTTCATTTTTAATTTAAAAGGATCTAG
GTGAAGATCCTTTTTGATAATCTCATGACCAAAATCCCTTAACGTGAGTT
TTCGTTCCACTGAGCGTCAGACCCCGTAGAAAAGATCAAAGGATCTTCTT
GAGATCCTTTTTTTCTGCGCGTAATCTGCTGCTTGCAAACAAAAAAACCA
CCGCTACCAGCGGTGGTTTGTTTGCCGGATCAAGAGCTACCAACTCTTTT
TCCGAAGGTAACTGGCTTCAGCAGAGCGCAGATACCAAATACTGTCCTTC
TAGTGTAGCCGTAGTTAGGCCACCACTTCAAGAACTCTGTAGCACCGCCT
ACATACCTCGCTCTGCTAATCCTGTTACCAGTGGCTGCTGCCAGTGGCGA
TAAGTCGTGTCTTACCGGGTTGGACTCAAGACGATAGTTACCGGATAAGG
CGCAGCGGTCGGGCTGAACGGGGGGTTCGTGCACACAGCCCAGCTTGGAG
CGAACGACCTACACCGAACTGAGATACCTACAGCGTGAGCTATGAGAAAG
CGCCACGCTTCCCGAAGGGAGAAAGGCGGACAGGTATCCGGTAAGCGGCA
GGGTCGGAACAGGAGAGCGCACGAGGGAGCTTCCAGGGGGAAACGCCTGG
TATCTTTATAGTCCTGTCGGGTTTCGCCACCTCTGACTTGAGCGTCGATT
TTTGTGATGCTCGTCAGGGGGGCGGAGCCTATGGAAAAACGCCAGCAACG
CGGCCTTTTTACGGTTCCTGGCCTTTTGCTGGCCTTTTGCTCACATGTTC
TTTCCTGCGTTATCCCCTGATTCTGTGGATAACCGTATTACCGCCTTTGA
GTGAGCTGATACCGCTCGCCGCAGCCGAACGACCGAGCGCAGCGAGTCAG
TGAGCGAGGAAGCGGATGAGCGCCCAATACGCAAACCGCCTCTCCCCGCG
CGTTGGCCGATTCATTAATGCAGCTGGCACGACAGGTTTCCCGACTGGAA
AGCGGGCAGTGAGCGCAACGCAATTAATGTGAGTTAGCTCACTCATTAGG
CACCCCAGGCTTTACACTTTATGCTTCCGGCTCGTATGTTGTGTGGAATT
GTGAGCGGATAACAATTTCACACAGGAAACAGCTATGACCATGATTACGC
CAAGCTTGCATGCCTGCAGGTCGACTCTAGAGGATCCCCGGGTACCGAGC
TCGAATTCACTGGCCGTCGTTTTACAACGTCGTGACTGGGAAAACCCTGG
CGTTACCCAACTTAATCGCCTTGCAGCACATCCCCCTTTCGCCAGCTGGC
GTAATAGCGAAGAGGCCCGCACCGATCGCCCTTCCCAACAGTTGCGCAGC
CTGAATGGCGAATGGCGCCTGATGCGGTATTTTCTCCTTACGCATCTGTG
CGGTATTTCACACCGCATATGGTGCACTCTCAGTACAATCTGCTCTGATG
CCGCATAGTTAAGCCAGCCCCGACACCCGCCAACACCCGCTGACGCGCCC
TGACGGGCTTGTCTGCTCCCGGCATCCGCTTACAGACAAGCTGTGAC

[chemical structure]

CCCTATTTGTTTATTTTTCTAAATACATTCAAATATGTATCCGCTCATGA
GACAATAACCCTGATAAATGCTTCAATAATATTGAAAAAGGAAGAGTATG
GCTAAAATGAGAATATCACCGGAATTGAAAAAACTGATCGAAAAATACCG
CTGCGTAAAAGATACGGAAGGAATGTCTCCTGCTAAGGTATATAAGCTGG
TGGGAGAAAATGAAAACCTATATTTAAAAATGACGGACAGCCGGTATAAA
GGGACCACCTATGATGTGGAACGGGAAAAGGACATGATGCTATGGCTGGA
AGGAAAGCTGCCTGTTCCAAAGGTCCTGCACTTTGAACGGCATGATGGCT
GGAGCAATCTGCTCATGAGTGAGGCCGATGGCGTCCTTTGCTCGGAAGAG
TATGAAGATGAACAAAGCCCTGAAAAGATTATCGAGCTGTATGCGGAGTG
CATCAGGCTCTTTCACTCCATCGACATATCGGATTGTCCCTATACGAATA
GCTTAGACAGCCGCTTAGCCGAATTGGATTACTTACTGAATAACGATCTG
GCCGATGTGGATTGCGAAAACTGGGAAGAGGACACTCCATTTAAAGATCC
GCGCGAGCTGTATGATTTTTTAAAGACGGAAAAGCCCGAAGAGGAACTTG
TCTTTTCCCACGGCGACCTGGGAGACAGCAACATCTTTGTGAAAGATGGC
AAAGTAAGTGGCTTTATTGATCTTGGGAGAAGCGGCAGGGCGGACAAGTG
GTATGACATTGCCTTCTGCGTCCGGTCGCTCAGGGAGGATATCGGGGAAG
AACAGTATGTCGAGCTATTTTTTGACTTACTGGGGATCAAGCCTGATTGG
GAGAAAATAAAATATTATATTTTACTGGATGAATTGTTTTAGGAGCCTGT
TTAATAAGATGATCTTCTTGAGATCGTTTTGGTCTGCGCGTAATCTCTTG
CTCTGAAAACGAAAAAACCGCCTTGCAGGGCGGTTTTTCGAAGGTTCTCT
GAGCTACCAACTCTTTGAACCGAGGTAACTGGCTTGGAGGAGCGCAGTCA
CCAAAACTTGTCCTTTCAGTTTAGCCTTAACCGGCGCATGACTTCAAGAC
TAACTCCTCTAAATCAATTACCAGTGGCTGCTGCCAGTGGTGCTTTTGCA
TGTCTTTCCGGGTTGGACTCAAGACGATAGTTACCGGATAAGGCGCAGCG
GTCGGACTGAACGGGGGGTTCGTGCATACAGTCCAGCTTGGAGCGAACTG
CCTACCCGGAACTGAGTGTCAGGCGTGGAATGAGACAAACGCGGCCATAA
CAGCGGAATGACACCGGTAAACCGAAAGGCAGGAACAGGAGAGCGCACGA
GGGAGCCGCCAGGGGGAAACGCCTGGTATCTTTATAGTCCTGTCGGGTTT
CGCCACCACTGATTTGAGCGTCAGATTTCGTGATGCTTGTCAGGGGGGCG
GAGCCTATGGAAAAACGGCTTTGCCGCGGCCCTCTCACTTCCCTGTTAAG
TATCTTCCTGGCATCTTCCAGGAAATCTCCGCCCCGTTCGTAAGCCATTT
CCGCTCGCCGCAGTCGAACGACCGAGCGTAGCGAGTCAGTGAGCGAGGAA
GCGGAATATATCCTGTATCACATATTCTGCTGACGCACCGGTGCAGCCTT
TTTTCTCCTGCCACATGAAGCACTTCACTGACACCCTCATCAGTGCCAAC
ATAGTAAGCCAGTATACACTCCGCTAGCGCGCAAGCGGCCGCA
>pMXLK_VM
(SEQ ID NO: 29)

[chemical structure]

GTCAGACCAAGTTTACTCAT
ATATACTTTAGATTGATTTAAAACTTCATTTTTAATTTAAAAGGATCTAG
GTGAAGATCCTTTTTGATAATCTCATGACCAAAATCCCTTAACGTGAGTT
TTCGTTCCACTGAGCGTCAGACCCCGTAGAAAAGATCAAAGGATCTTCTT
GAGATCCTTTTTTTCTGCGCGTAATCTGCTGCTTGCAAACAAAAAAACCA
CCGCTACCAGCGGTGGTTTGTTTGCCGGATCAAGAGCTACCAACTCTTTT
TCCGAAGGTAACTGGCTTCAGCAGAGCGCAGATACCAAATACTGTCCTTC
TAGTGTAGCCGTAGTTAGGCCACCACTTCAAGAACTCTGTAGCACCGCCT
ACATACCTCGCTCTGCTAATCCTGTTACCAGTGGCTGCTGCCAGTGGCGA
TAAGTCGTGTCTTACCGGGTTGGACTCAAGACGATAGTTACCGGATAAGG
CGCAGCGGTCGGGCTGAACGGGGGGTTCGTGCACACAGCCCAGCTTGGAG
CGAACGACCTACACCGAACTGAGATACCTACAGCGTGAGCTATGAGAAAG
CGCCACGCTTCCCGAAGGGAGAAAGGCGGACAGGTATCCGGTAAGCGGCA
GGGTCGGAACAGGAGAGCGCACGAGGGAGCTTCCAGGGGGAAACGCCTGG
TATCTTTATAGTCCTGTCGGGTTTCGCCACCTCTGACTTGAGCGTCGATT
TTTGTGATGCTCGTCAGGGGGGCGGAGCCTATGGAAAAACGCCAGCAACG
CGGCCTTTTTACGGTTCCTGGCCTTTTGCTGGCCTTTTGCTCACATGTTC
TTTCCTGCGTTATCCCCTGATTCTGTGGATAACCGTATTACCGCCTTTGA
GTGAGCTGATACCGCTCGCCGCAGCCGAACGACCGAGCGCAGCGAGTCAG
TGAGCGAGGAAGCGGATGAGCGCCCAATACGCAAACCGCCTCTCCCCGCG
CGTTGGCCGATTCATTAATGCAGCTGGCACGACAGGTTTCCCGACTGGAA
AGCGGGCAGTGAGCGCAACGCAATTAATGTGAGTTAGCTCACTCATTAGG
CACCCCAGGCTTTACACTTTATGCTTCCGGCTCGTATGTTGTGTGGAATT
GTGAGCGGATAACAATTTCACACAGGAAACAGCTATGACCATGATTACGC
CAAGCTTGCATGCCTGCAGGTCGACTCTAGAGGATCCCCGGGTACCGAGC
TCGAATTCACTGGCCGTCGTTTTACAACGTCGTGACTGGGAAAACCCTGG
CGTTACCCAACTTAATCGCCTTGCAGCACATCCCCCTTTCGCCAGCTGGC
GTAATAGCGAAGAGGCCCGCACCGATCGCCCTTCCCAACAGTTGCGCAGC
CTGAATGGCGAATGGCGCCTGATGCGGTATTTTCTCCTTACGCATCTGTG
CGGTATTTCACACCGCATATGGTGCACTCTCAGTACAATCTGCTCTGATG
CCGCATAGTTAAGCCAGCCCCGACACCCGCCAACACCCGCTGACGCGCCC
TGACGGGCTTGTCTGCTCCCGGCATCCGCTTACAGACAAGCTGTGAC

[chemical structure]

CCCTATTTGTTTATTTTTCTAAATACATTCAAATATGTATCCGCTCATGA
GACAATAACCCTGATAAATGCTTCAATAATATTGAAAAAGGAAGAGTATG
GCTAAAATGAGAATATCACCGGAATTGAAAAAACTGATCGAAAAATACCG
CTGCGTAAAAGATACGGAAGGAATGTCTCCTGCTAAGGTATATAAGCTGG
TGGGAGAAAATGAAAACCTATATTTAAAAATGACGGACAGCCGGTATAAA
GGGACCACCTATGATGTGGAACGGGAAAAGGACATGATGCTATGGCTGGA
AGGAAAGCTGCCTGTTCCAAAGGTCCTGCACTTTGAACGGCATGATGGCT
GGAGCAATCTGCTCATGAGTGAGGCCGATGGCGTCCTTTGCTCGGAAGAG
TATGAAGATGAACAAAGCCCTGAAAAGATTATCGAGCTGTATGCGGAGTG
CATCAGGCTCTTTCACTCCATCGACATATCGGATTGTCCCTATACGAATA
GCTTAGACAGCCGCTTAGCCGAATTGGATTACTTACTGAATAACGATCTG
GCCGATGTGGATTGCGAAAACTGGGAAGAGGACACTCCATTTAAAGATCC
GCGCGAGCTGTATGATTTTTTAAAGACGGAAAAGCCCGAAGAGGAACTTG
TCTTTTCCCACGGCGACCTGGGAGACAGCAACATCTTTGTGAAAGATGGC
AAAGTAAGTGGCTTTATTGATCTTGGGAGAAGCGGCAGGGCGGACAAGTG
GTATGACATTGCCTTCTGCGTCCGGTCGCTCAGGGAGGATATCGGGGAAG
AACAGTATGTCGAGCTATTTTTTGACTTACTGGGGATCAAGCCTGATTGG
GAGAAAATAAAATATTATATTTTACTGGATGAATTGTTTTAGGAGCCTGT
TTAATAAGATGATCTTCTTGAGATCGTTTTGGTCTGCGCGTAATCTCTTG
CTCTGAAAACGAAAAAACCGCCTTGCAGGGCGGTTTTTCGAAGGTTCTCT
GAGCTACCAACTCTTTGAACCGAGGTAACTGGCTTGGAGGAGCGCAGTCA
CCAAAACTTGTCCTTTCAGTTTAGCCTTAACCGGCGCATGACTTCAAGAC
TAACTCCTCTAAATCAATTACCAGTGGCTGCTGCCAGTGGTGCTTTTGCA
TGTCTTTCCGGGTTGGACTCAAGACGATAGTTACCGGATAAGGCGCAGCG
GTCGGACTGAACGGGGGGTTCGTGCATACAGTCCAGCTTGGAGCGAACTG
CCTACCCGGAACTGAGTGTCAGGCGTGGAATGAGACAAACGCGGCCATAA
CAGCGGAATGACACCGGTAAACCGAAAGGCAGGAACAGGAGAGCGCACGA
GGGAGCCGCCAGGGGGAAACGCCTGGTATCTTTATAGTCCTGTCGGGTTT
CGCCACCACTGATTTGAGCGTCAGATTTCGTGATGCTTGTCAGGGGGGCG
GAGCCTATGGAAAAACGGCTTTGCCGCGGCCCTCTCACTTCCCTGTTAAG
TATCTTCCTGGCATCTTCCAGGAAATCTCCGCCCCGTTCGTAAGCCATTT
CCGCTCGCCGCAGTCGAACGACCGAGCGTAGCGAGTCAGTGAGCGAGGAA
GCGGAATATATCCTGTATCACATATTCTGCTGACGCACCGGTGCAGCCTT
TTTTCTCCTGCCACATGAAGCACTTCACTGACACCCTCATCAGTGCCAAC
ATAGTAAGCCAGTATACACTCCGCTAGCGCGCAAGCGGCCGCA
>pMXLK_VR
(SEQ ID NO: 30)

[chemical structure]

GTCAGACCAAGTTTACTCAT
ATATACTTTAGATTGATTTAAAACTTCATTTTTAATTTAAAAGGATCTAG
GTGAAGATCCTTTTTGATAATCTCATGACCAAAATCCCTTAACGTGAGTT
TTCGTTCCACTGAGCGTCAGACCCCGTAGAAAAGATCAAAGGATCTTCTT
GAGATCCTTTTTTTCTGCGCGTAATCTGCTGCTTGCAAACAAAAAAACCA
CCGCTACCAGCGGTGGTTTGTTTGCCGGATCAAGAGCTACCAACTCTTTT
TCCGAAGGTAACTGGCTTCAGCAGAGCGCAGATACCAAATACTGTCCTTC
TAGTGTAGCCGTAGTTAGGCCACCACTTCAAGAACTCTGTAGCACCGCCT
ACATACCTCGCTCTGCTAATCCTGTTACCAGTGGCTGCTGCCAGTGGCGA
TAAGTCGTGTCTTACCGGGTTGGACTCAAGACGATAGTTACCGGATAAGG
CGCAGCGGTCGGGCTGAACGGGGGGTTCGTGCACACAGCCCAGCTTGGAG
CGAACGACCTACACCGAACTGAGATACCTACAGCGTGAGCTATGAGAAAG
CGCCACGCTTCCCGAAGGGAGAAAGGCGGACAGGTATCCGGTAAGCGGCA
GGGTCGGAACAGGAGAGCGCACGAGGGAGCTTCCAGGGGGAAACGCCTGG
TATCTTTATAGTCCTGTCGGGTTTCGCCACCTCTGACTTGAGCGTCGATT
TTTGTGATGCTCGTCAGGGGGGCGGAGCCTATGGAAAAACGCCAGCAACG
CGGCCTTTTTACGGTTCCTGGCCTTTTGCTGGCCTTTTGCTCACATGTTC
TTTCCTGCGTTATCCCCTGATTCTGTGGATAACCGTATTACCGCCTTTGA
GTGAGCTGATACCGCTCGCCGCAGCCGAACGACCGAGCGCAGCGAGTCAG
TGAGCGAGGAAGCGGATGAGCGCCCAATACGCAAACCGCCTCTCCCCGCG
CGTTGGCCGATTCATTAATGCAGCTGGCACGACAGGTTTCCCGACTGGAA
AGCGGGCAGTGAGCGCAACGCAATTAATGTGAGTTAGCTCACTCATTAGG
CACCCCAGGCTTTACACTTTATGCTTCCGGCTCGTATGTTGTGTGGAATT
GTGAGCGGATAACAATTTCACACAGGAAACAGCTATGACCATGATTACGC
CAAGCTTGCATGCCTGCAGGTCGACTCTAGAGGATCCCCGGGTACCGAGC
TCGAATTCACTGGCCGTCGTTTTACAACGTCGTGACTGGGAAAACCCTGG
CGTTACCCAACTTAATCGCCTTGCAGCACATCCCCCTTTCGCCAGCTGGC
GTAATAGCGAAGAGGCCCGCACCGATCGCCCTTCCCAACAGTTGCGCAGC
CTGAATGGCGAATGGCGCCTGATGCGGTATTTTCTCCTTACGCATCTGTG
CGGTATTTCACACCGCATATGGTGCACTCTCAGTACAATCTGCTCTGATG
CCGCATAGTTAAGCCAGCCCCGACACCCGCCAACACCCGCTGACGCGCCC
TGACGGGCTTGTCTGCTCCCGGCATCCGCTTACAGACAAGCTGTGAC

[chemical structure]

CCCTATTTGTTTATTTTTCTAAATACATTCAAATATGTATCCGCTCATGA
GACAATAACCCTGATAAATGCTTCAATAATATTGAAAAAGGAAGAGTATG
GCTAAAATGAGAATATCACCGGAATTGAAAAAACTGATCGAAAAATACCG
CTGCGTAAAAGATACGGAAGGAATGTCTCCTGCTAAGGTATATAAGCTGG
TGGGAGAAAATGAAAACCTATATTTAAAAATGACGGACAGCCGGTATAAA
GGGACCACCTATGATGTGGAACGGGAAAAGGACATGATGCTATGGCTGGA
AGGAAAGCTGCCTGTTCCAAAGGTCCTGCACTTTGAACGGCATGATGGCT
GGAGCAATCTGCTCATGAGTGAGGCCGATGGCGTCCTTTGCTCGGAAGAG
TATGAAGATGAACAAAGCCCTGAAAAGATTATCGAGCTGTATGCGGAGTG
CATCAGGCTCTTTCACTCCATCGACATATCGGATTGTCCCTATACGAATA
GCTTAGACAGCCGCTTAGCCGAATTGGATTACTTACTGAATAACGATCTG
GCCGATGTGGATTGCGAAAACTGGGAAGAGGACACTCCATTTAAAGATCC
GCGCGAGCTGTATGATTTTTTAAAGACGGAAAAGCCCGAAGAGGAACTTG
TCTTTTCCCACGGCGACCTGGGAGACAGCAACATCTTTGTGAAAGATGGC
AAAGTAAGTGGCTTTATTGATCTTGGGAGAAGCGGCAGGGCGGACAAGTG
GTATGACATTGCCTTCTGCGTCCGGTCGCTCAGGGAGGATATCGGGGAAG
AACAGTATGTCGAGCTATTTTTTGACTTACTGGGGATCAAGCCTGATTGG
GAGAAAATAAAATATTATATTTTACTGGATGAATTGTTTTAGGAGCCTGT
TTAATAAGATGATCTTCTTGAGATCGTTTTGGTCTGCGCGTAATCTCTTG
CTCTGAAAACGAAAAAACCGCCTTGCAGGGCGGTTTTTCGAAGGTTCTCT
GAGCTACCAACTCTTTGAACCGAGGTAACTGGCTTGGAGGAGCGCAGTCA
CCAAAACTTGTCCTTTCAGTTTAGCCTTAACCGGCGCATGACTTCAAGAC
TAACTCCTCTAAATCAATTACCAGTGGCTGCTGCCAGTGGTGCTTTTGCA
TGTCTTTCCGGGTTGGACTCAAGACGATAGTTACCGGATAAGGCGCAGCG
GTCGGACTGAACGGGGGGTTCGTGCATACAGTCCAGCTTGGAGCGAACTG
CCTACCCGGAACTGAGTGTCAGGCGTGGAATGAGACAAACGCGGCCATAA
CAGCGGAATGACACCGGTAAACCGAAAGGCAGGAACAGGAGAGCGCACGA
GGGAGCCGCCAGGGGGAAACGCCTGGTATCTTTATAGTCCTGTCGGGTTT
CGCCACCACTGATTTGAGCGTCAGATTTCGTGATGCTTGTCAGGGGGGCG
GAGCCTATGGAAAAACGGCTTTGCCGCGGCCCTCTCACTTCCCTGTTAAG
TATCTTCCTGGCATCTTCCAGGAAATCTCCGCCCCGTTCGTAAGCCATTT
CCGCTCGCCGCAGTCGAACGACCGAGCGTAGCGAGTCAGTGAGCGAGGAA
GCGGAATATATCCTGTATCACATATTCTGCTGACGCACCGGTGCAGCCTT
TTTTCTCCTGCCACATGAAGCACTTCACTGACACCCTCATCAGTGCCAAC
ATAGTAAGCCAGTATACACTCCGCTAGCGCGCAAGCGGCCGCA
>pMZLK_VL
(SEQ ID NO: 31)

[chemical structure]

GGTCAGACCAAGTTTACTCAT
ATATACTTTAGATTGATTTAAAACTTCATTTTTAATTTAAAAGGATCTAG
GTGAAGATCCTTTTTGATAATCTCATGACCAAAATCCCTTAACGTGAGTT
TTCGTTCCACTGAGCGTCAGACCCCGTAGAAAAGATCAAAGGATCTTCTT
GAGATCCTTTTTTTCTGCGCGTAATCTGCTGCTTGCAAACAAAAAAACCA
CCGCTACCAGCGGTGGTTTGTTTGCCGGATCAAGAGCTACCAACTCTTTT
TCCGAAGGTAACTGGCTTCAGCAGAGCGCAGATACCAAATACTGTCCTTC
TAGTGTAGCCGTAGTTAGGCCACCACTTCAAGAACTCTGTAGCACCGCCT
ACATACCTCGCTCTGCTAATCCTGTTACCAGTGGCTGCTGCCAGTGGCGA
TAAGTCGTGTCTTACCGGGTTGGACTCAAGACGATAGTTACCGGATAAGG
CGCAGCGGTCGGGCTGAACGGGGGGTTCGTGCACACAGCCCAGCTTGGAG
CGAACGACCTACACCGAACTGAGATACCTACAGCGTGAGCTATGAGAAAG
CGCCACGCTTCCCGAAGGGAGAAAGGCGGACAGGTATCCGGTAAGCGGCA
GGGTCGGAACAGGAGAGCGCACGAGGGAGCTTCCAGGGGGAAACGCCTGG
TATCTTTATAGTCCTGTCGGGTTTCGCCACCTCTGACTTGAGCGTCGATT
TTTGTGATGCTCGTCAGGGGGGCGGAGCCTATGGAAAAACGCCAGCAACG
CGGCCTTTTTACGGTTCCTGGCCTTTTGCTGGCCTTTTGCTCACATGTTC
TTTCCTGCGTTATCCCCTGATTCTGTGGATAACCGTATTACCGCCTTTGA
GTGAGCTGATACCGCTCGCCGCAGCCGAACGACCGAGCGCAGCGAGTCAG
TGAGCGAGGAAGCGGATGAGCGCCCAATACGCAAACCGCCTCTCCCCGCG
CGTTGGCCGATTCATTAATGCAGCTGGCACGACAGGTTTCCCGACTGGAA
AGCGGGCAGTGAGCGCAACGCAATTAATGTGAGTTAGCTCACTCATTAGG
CACCCCAGGCTTTACACTTTATGCTTCCGGCTCGTATGTTGTGTGGAATT
GTGAGCGGATAACAATTTCACACAGGAAACAGCTATGACCATGATTACGC
CAAGCTTGCATGCCTGCAGGTCGACTCTAGAGGATCCCCGGGTACCGAGC
TCGAATTCACTGGCCGTCGTTTTACAACGTCGTGACTGGGAAAACCCTGG
CGTTACCCAACTTAATCGCCTTGCAGCACATCCCCCTTTCGCCAGCTGGC
GTAATAGCGAAGAGGCCCGCACCGATCGCCCTTCCCAACAGTTGCGCAGC
CTGAATGGCGAATGGCGCCTGATGCGGTATTTTCTCCTTACGCATCTGTG
CGGTATTTCACACCGCATATGGTGCACTCTCAGTACAATCTGCTCTGATG
CCGCATAGTTAAGCCAGCCCCGACACCCGCCAACACCCGCTGACGCGCCC
TGACGGGCTTGTCTGCTCCCGGCATCCGCTTACAGACAAGCTGTGACC

[chemical structure]

CCCTATTTGTTTATTTTTCTAAATACATTCAAATATGTATCCGCTCATGA
GACAATAACCCTGATAAATGCTTCAATAATATTGAAAAAGGAAGAGTATG
GCTAAAATGAGAATATCACCGGAATTGAAAAAACTGATCGAAAAATACCG
CTGCGTAAAAGATACGGAAGGAATGTCTCCTGCTAAGGTATATAAGCTGG
TGGGAGAAAATGAAAACCTATATTTAAAAATGACGGACAGCCGGTATAAA
GGGACCACCTATGATGTGGAACGGGAAAAGGACATGATGCTATGGCTGGA
AGGAAAGCTGCCTGTTCCAAAGGTCCTGCACTTTGAACGGCATGATGGCT
GGAGCAATCTGCTCATGAGTGAGGCCGATGGCGTCCTTTGCTCGGAAGAG
TATGAAGATGAACAAAGCCCTGAAAAGATTATCGAGCTGTATGCGGAGTG
CATCAGGCTCTTTCACTCCATCGACATATCGGATTGTCCCTATACGAATA
GCTTAGACAGCCGCTTAGCCGAATTGGATTACTTACTGAATAACGATCTG
GCCGATGTGGATTGCGAAAACTGGGAAGAGGACACTCCATTTAAAGATCC
GCGCGAGCTGTATGATTTTTTAAAGACGGAAAAGCCCGAAGAGGAACTTG
TCTTTTCCCACGGCGACCTGGGAGACAGCAACATCTTTGTGAAAGATGGC
AAAGTAAGTGGCTTTATTGATCTTGGGAGAAGCGGCAGGGCGGACAAGTG
GTATGACATTGCCTTCTGCGTCCGGTCGCTCAGGGAGGATATCGGGGAAG
AACAGTATGTCGAGCTATTTTTTGACTTACTGGGGATCAAGCCTGATTGG
GAGAAAATAAAATATTATATTTTACTGGATGAATTGTTTTAGGAGCCTGT
TTAATAAGATGATCTTCTTGAGATCGTTTTGGTCTGCGCGTAATCTCTTG
CTCTGAAAACGAAAAAACCGCCTTGCAGGGCGGTTTTTCGAAGGTTCTCT
GAGCTACCAACTCTTTGAACCGAGGTAACTGGCTTGGAGGAGCGCAGTCA
CCAAAACTTGTCCTTTCAGTTTAGCCTTAACCGGCGCATGACTTCAAGAC
TAACTCCTCTAAATCAATTACCAGTGGCTGCTGCCAGTGGTGCTTTTGCA
TGTCTTTCCGGGTTGGACTCAAGACGATAGTTACCGGATAAGGCGCAGCG
GTCGGACTGAACGGGGGGTTCGTGCATACAGTCCAGCTTGGAGCGAACTG
CCTACCCGGAACTGAGTGTCAGGCGTGGAATGAGACAAACGCGGCCATAA
CAGCGGAATGACACCGGTAAACCGAAAGGCAGGAACAGGAGAGCGCACGA
GGGAGCCGCCAGGGGGAAACGCCTGGTATCTTTATAGTCCTGTCGGGTTT
CGCCACCACTGATTTGAGCGTCAGATTTCGTGATGCTTGTCAGGGGGGCG
GAGCCTATGGAAAAACGGCTTTGCCGCGGCCCTCTCACTTCCCTGTTAAG
TATCTTCCTGGCATCTTCCAGGAAATCTCCGCCCCGTTCGTAAGCCATTT
CCGCTCGCCGCAGTCGAACGACCGAGCGTAGCGAGTCAGTGAGCGAGGAA
GCGGAATATATCCTGTATCACATATTCTGCTGACGCACCGGTGCAGCCTT
TTTTCTCCTGCCACATGAAGCACTTCACTGACACCCTCATCAGTGCCAAC
ATAGTAAGCCAGTATACACTCCGCTAGCGCGCAAGCGGCCGCA
>pMZLK_VM
(SEQ ID NO: 32)

[chemical structure]

GGTCAGACCAAGTTTACTCAT
ATATACTTTAGATTGATTTAAAACTTCATTTTTAATTTAAAAGGATCTAG
GTGAAGATCCTTTTTGATAATCTCATGACCAAAATCCCTTAACGTGAGTT
TTCGTTCCACTGAGCGTCAGACCCCGTAGAAAAGATCAAAGGATCTTCTT
GAGATCCTTTTTTTCTGCGCGTAATCTGCTGCTTGCAAACAAAAAAACCA
CCGCTACCAGCGGTGGTTTGTTTGCCGGATCAAGAGCTACCAACTCTTTT
TCCGAAGGTAACTGGCTTCAGCAGAGCGCAGATACCAAATACTGTCCTTC
TAGTGTAGCCGTAGTTAGGCCACCACTTCAAGAACTCTGTAGCACCGCCT
ACATACCTCGCTCTGCTAATCCTGTTACCAGTGGCTGCTGCCAGTGGCGA
TAAGTCGTGTCTTACCGGGTTGGACTCAAGACGATAGTTACCGGATAAGG
CGCAGCGGTCGGGCTGAACGGGGGGTTCGTGCACACAGCCCAGCTTGGAG
CGAACGACCTACACCGAACTGAGATACCTACAGCGTGAGCTATGAGAAAG
CGCCACGCTTCCCGAAGGGAGAAAGGCGGACAGGTATCCGGTAAGCGGCA
GGGTCGGAACAGGAGAGCGCACGAGGGAGCTTCCAGGGGGAAACGCCTGG
TATCTTTATAGTCCTGTCGGGTTTCGCCACCTCTGACTTGAGCGTCGATT
TTTGTGATGCTCGTCAGGGGGGCGGAGCCTATGGAAAAACGCCAGCAACG
CGGCCTTTTTACGGTTCCTGGCCTTTTGCTGGCCTTTTGCTCACATGTTC
TTTCCTGCGTTATCCCCTGATTCTGTGGATAACCGTATTACCGCCTTTGA
GTGAGCTGATACCGCTCGCCGCAGCCGAACGACCGAGCGCAGCGAGTCAG
TGAGCGAGGAAGCGGATGAGCGCCCAATACGCAAACCGCCTCTCCCCGCG
CGTTGGCCGATTCATTAATGCAGCTGGCACGACAGGTTTCCCGACTGGAA
AGCGGGCAGTGAGCGCAACGCAATTAATGTGAGTTAGCTCACTCATTAGG
CACCCCAGGCTTTACACTTTATGCTTCCGGCTCGTATGTTGTGTGGAATT
GTGAGCGGATAACAATTTCACACAGGAAACAGCTATGACCATGATTACGC
CAAGCTTGCATGCCTGCAGGTCGACTCTAGAGGATCCCCGGGTACCGAGC
TCGAATTCACTGGCCGTCGTTTTACAACGTCGTGACTGGGAAAACCCTGG
CGTTACCCAACTTAATCGCCTTGCAGCACATCCCCCTTTCGCCAGCTGGC
GTAATAGCGAAGAGGCCCGCACCGATCGCCCTTCCCAACAGTTGCGCAGC
CTGAATGGCGAATGGCGCCTGATGCGGTATTTTCTCCTTACGCATCTGTG
CGGTATTTCACACCGCATATGGTGCACTCTCAGTACAATCTGCTCTGATG
CCGCATAGTTAAGCCAGCCCCGACACCCGCCAACACCCGCTGACGCGCCC
TGACGGGCTTGTCTGCTCCCGGCATCCGCTTACAGACAAGCTGTGACC

[chemical structure]

CCCTATTTGTTTATTTTTCTAAATACATTCAAATATGTATCCGCTCATGA
GACAATAACCCTGATAAATGCTTCAATAATATTGAAAAAGGAAGAGTATG
GCTAAAATGAGAATATCACCGGAATTGAAAAAACTGATCGAAAAATACCG
CTGCGTAAAAGATACGGAAGGAATGTCTCCTGCTAAGGTATATAAGCTGG
TGGGAGAAAATGAAAACCTATATTTAAAAATGACGGACAGCCGGTATAAA
GGGACCACCTATGATGTGGAACGGGAAAAGGACATGATGCTATGGCTGGA
AGGAAAGCTGCCTGTTCCAAAGGTCCTGCACTTTGAACGGCATGATGGCT
GGAGCAATCTGCTCATGAGTGAGGCCGATGGCGTCCTTTGCTCGGAAGAG
TATGAAGATGAACAAAGCCCTGAAAAGATTATCGAGCTGTATGCGGAGTG
CATCAGGCTCTTTCACTCCATCGACATATCGGATTGTCCCTATACGAATA
GCTTAGACAGCCGCTTAGCCGAATTGGATTACTTACTGAATAACGATCTG
GCCGATGTGGATTGCGAAAACTGGGAAGAGGACACTCCATTTAAAGATCC
GCGCGAGCTGTATGATTTTTTAAAGACGGAAAAGCCCGAAGAGGAACTTG
TCTTTTCCCACGGCGACCTGGGAGACAGCAACATCTTTGTGAAAGATGGC
AAAGTAAGTGGCTTTATTGATCTTGGGAGAAGCGGCAGGGCGGACAAGTG
GTATGACATTGCCTTCTGCGTCCGGTCGCTCAGGGAGGATATCGGGGAAG
AACAGTATGTCGAGCTATTTTTTGACTTACTGGGGATCAAGCCTGATTGG
GAGAAAATAAAATATTATATTTTACTGGATGAATTGTTTTAGGAGCCTGT
TTAATAAGATGATCTTCTTGAGATCGTTTTGGTCTGCGCGTAATCTCTTG
CTCTGAAAACGAAAAAACCGCCTTGCAGGGCGGTTTTTCGAAGGTTCTCT
GAGCTACCAACTCTTTGAACCGAGGTAACTGGCTTGGAGGAGCGCAGTCA
CCAAAACTTGTCCTTTCAGTTTAGCCTTAACCGGCGCATGACTTCAAGAC
TAACTCCTCTAAATCAATTACCAGTGGCTGCTGCCAGTGGTGCTTTTGCA
TGTCTTTCCGGGTTGGACTCAAGACGATAGTTACCGGATAAGGCGCAGCG
GTCGGACTGAACGGGGGGTTCGTGCATACAGTCCAGCTTGGAGCGAACTG
CCTACCCGGAACTGAGTGTCAGGCGTGGAATGAGACAAACGCGGCCATAA
CAGCGGAATGACACCGGTAAACCGAAAGGCAGGAACAGGAGAGCGCACGA
GGGAGCCGCCAGGGGGAAACGCCTGGTATCTTTATAGTCCTGTCGGGTTT
CGCCACCACTGATTTGAGCGTCAGATTTCGTGATGCTTGTCAGGGGGGCG
GAGCCTATGGAAAAACGGCTTTGCCGCGGCCCTCTCACTTCCCTGTTAAG
TATCTTCCTGGCATCTTCCAGGAAATCTCCGCCCCGTTCGTAAGCCATTT
CCGCTCGCCGCAGTCGAACGACCGAGCGTAGCGAGTCAGTGAGCGAGGAA
GCGGAATATATCCTGTATCACATATTCTGCTGACGCACCGGTGCAGCCTT
TTTTCTCCTGCCACATGAAGCACTTCACTGACACCCTCATCAGTGCCAAC
ATAGTAAGCCAGTATACACTCCGCTAGCGCGCAAGCGGCCGCA
>pMZLK_VR
(SEQ ID NO: 33)

[chemical structure]

GGTCAGACCAAGTTTACTCAT
ATATACTTTAGATTGATTTAAAACTTCATTTTTAATTTAAAAGGATCTAG
GTGAAGATCCTTTTTGATAATCTCATGACCAAAATCCCTTAACGTGAGTT
TTCGTTCCACTGAGCGTCAGACCCCGTAGAAAAGATCAAAGGATCTTCTT
GAGATCCTTTTTTTCTGCGCGTAATCTGCTGCTTGCAAACAAAAAAACCA
CCGCTACCAGCGGTGGTTTGTTTGCCGGATCAAGAGCTACCAACTCTTTT
TCCGAAGGTAACTGGCTTCAGCAGAGCGCAGATACCAAATACTGTCCTTC
TAGTGTAGCCGTAGTTAGGCCACCACTTCAAGAACTCTGTAGCACCGCCT
ACATACCTCGCTCTGCTAATCCTGTTACCAGTGGCTGCTGCCAGTGGCGA
TAAGTCGTGTCTTACCGGGTTGGACTCAAGACGATAGTTACCGGATAAGG
CGCAGCGGTCGGGCTGAACGGGGGGTTCGTGCACACAGCCCAGCTTGGAG
CGAACGACCTACACCGAACTGAGATACCTACAGCGTGAGCTATGAGAAAG
CGCCACGCTTCCCGAAGGGAGAAAGGCGGACAGGTATCCGGTAAGCGGCA
GGGTCGGAACAGGAGAGCGCACGAGGGAGCTTCCAGGGGGAAACGCCTGG
TATCTTTATAGTCCTGTCGGGTTTCGCCACCTCTGACTTGAGCGTCGATT
TTTGTGATGCTCGTCAGGGGGGCGGAGCCTATGGAAAAACGCCAGCAACG
CGGCCTTTTTACGGTTCCTGGCCTTTTGCTGGCCTTTTGCTCACATGTTC
TTTCCTGCGTTATCCCCTGATTCTGTGGATAACCGTATTACCGCCTTTGA
GTGAGCTGATACCGCTCGCCGCAGCCGAACGACCGAGCGCAGCGAGTCAG
TGAGCGAGGAAGCGGATGAGCGCCCAATACGCAAACCGCCTCTCCCCGCG
CGTTGGCCGATTCATTAATGCAGCTGGCACGACAGGTTTCCCGACTGGAA
AGCGGGCAGTGAGCGCAACGCAATTAATGTGAGTTAGCTCACTCATTAGG
CACCCCAGGCTTTACACTTTATGCTTCCGGCTCGTATGTTGTGTGGAATT
GTGAGCGGATAACAATTTCACACAGGAAACAGCTATGACCATGATTACGC
CAAGCTTGCATGCCTGCAGGTCGACTCTAGAGGATCCCCGGGTACCGAGC
TCGAATTCACTGGCCGTCGTTTTACAACGTCGTGACTGGGAAAACCCTGG
CGTTACCCAACTTAATCGCCTTGCAGCACATCCCCCTTTCGCCAGCTGGC
GTAATAGCGAAGAGGCCCGCACCGATCGCCCTTCCCAACAGTTGCGCAGC
CTGAATGGCGAATGGCGCCTGATGCGGTATTTTCTCCTTACGCATCTGTG
CGGTATTTCACACCGCATATGGTGCACTCTCAGTACAATCTGCTCTGATG
CCGCATAGTTAAGCCAGCCCCGACACCCGCCAACACCCGCTGACGCGCCC
TGACGGGCTTGTCTGCTCCCGGCATCCGCTTACAGACAAGCTGTGACC

[chemical structure]

CCCTATTTGTTTATTTTTCTAAATACATTCAAATATGTATCCGCTCATGA
GACAATAACCCTGATAAATGCTTCAATAATATTGAAAAAGGAAGAGTATG
GCTAAAATGAGAATATCACCGGAATTGAAAAAACTGATCGAAAAATACCG
CTGCGTAAAAGATACGGAAGGAATGTCTCCTGCTAAGGTATATAAGCTGG
TGGGAGAAAATGAAAACCTATATTTAAAAATGACGGACAGCCGGTATAAA
GGGACCACCTATGATGTGGAACGGGAAAAGGACATGATGCTATGGCTGGA
AGGAAAGCTGCCTGTTCCAAAGGTCCTGCACTTTGAACGGCATGATGGCT
GGAGCAATCTGCTCATGAGTGAGGCCGATGGCGTCCTTTGCTCGGAAGAG
TATGAAGATGAACAAAGCCCTGAAAAGATTATCGAGCTGTATGCGGAGTG
CATCAGGCTCTTTCACTCCATCGACATATCGGATTGTCCCTATACGAATA
GCTTAGACAGCCGCTTAGCCGAATTGGATTACTTACTGAATAACGATCTG
GCCGATGTGGATTGCGAAAACTGGGAAGAGGACACTCCATTTAAAGATCC
GCGCGAGCTGTATGATTTTTTAAAGACGGAAAAGCCCGAAGAGGAACTTG
TCTTTTCCCACGGCGACCTGGGAGACAGCAACATCTTTGTGAAAGATGGC
AAAGTAAGTGGCTTTATTGATCTTGGGAGAAGCGGCAGGGCGGACAAGTG
GTATGACATTGCCTTCTGCGTCCGGTCGCTCAGGGAGGATATCGGGGAAG
AACAGTATGTCGAGCTATTTTTTGACTTACTGGGGATCAAGCCTGATTGG
GAGAAAATAAAATATTATATTTTACTGGATGAATTGTTTTAGGAGCCTGT
TTAATAAGATGATCTTCTTGAGATCGTTTTGGTCTGCGCGTAATCTCTTG
CTCTGAAAACGAAAAAACCGCCTTGCAGGGCGGTTTTTCGAAGGTTCTCT
GAGCTACCAACTCTTTGAACCGAGGTAACTGGCTTGGAGGAGCGCAGTCA
CCAAAACTTGTCCTTTCAGTTTAGCCTTAACCGGCGCATGACTTCAAGAC
TAACTCCTCTAAATCAATTACCAGTGGCTGCTGCCAGTGGTGCTTTTGCA
TGTCTTTCCGGGTTGGACTCAAGACGATAGTTACCGGATAAGGCGCAGCG
GTCGGACTGAACGGGGGGTTCGTGCATACAGTCCAGCTTGGAGCGAACTG
CCTACCCGGAACTGAGTGTCAGGCGTGGAATGAGACAAACGCGGCCATAA
CAGCGGAATGACACCGGTAAACCGAAAGGCAGGAACAGGAGAGCGCACGA
GGGAGCCGCCAGGGGGAAACGCCTGGTATCTTTATAGTCCTGTCGGGTTT
CGCCACCACTGATTTGAGCGTCAGATTTCGTGATGCTTGTCAGGGGGGCG
GAGCCTATGGAAAAACGGCTTTGCCGCGGCCCTCTCACTTCCCTGTTAAG
TATCTTCCTGGCATCTTCCAGGAAATCTCCGCCCCGTTCGTAAGCCATTT
CCGCTCGCCGCAGTCGAACGACCGAGCGTAGCGAGTCAGTGAGCGAGGAA
GCGGAATATATCCTGTATCACATATTCTGCTGACGCACCGGTGCAGCCTT
TTTTCTCCTGCCACATGAAGCACTTCACTGACACCCTCATCAGTGCCAAC
ATAGTAAGCCAGTATACACTCCGCTAGCGCGCAAGCGGCCGCA
>pMXLS_VL
(SEQ ID NO: 34)

[chemical structure]

GTCAGACCAAGTTTACTCAT
ATATACTTTAGATTGATTTAAAACTTCATTTTTAATTTAAAAGGATCTAG
GTGAAGATCCTTTTTGATAATCTCATGACCAAAATCCCTTAACGTGAGTT
TTCGTTCCACTGAGCGTCAGACCCCGTAGAAAAGATCAAAGGATCTTCTT
GAGATCCTTTTTTTCTGCGCGTAATCTGCTGCTTGCAAACAAAAAAACCA
CCGCTACCAGCGGTGGTTTGTTTGCCGGATCAAGAGCTACCAACTCTTTT
TCCGAAGGTAACTGGCTTCAGCAGAGCGCAGATACCAAATACTGTCCTTC
TAGTGTAGCCGTAGTTAGGCCACCACTTCAAGAACTCTGTAGCACCGCCT
ACATACCTCGCTCTGCTAATCCTGTTACCAGTGGCTGCTGCCAGTGGCGA
TAAGTCGTGTCTTACCGGGTTGGACTCAAGACGATAGTTACCGGATAAGG
CGCAGCGGTCGGGCTGAACGGGGGGTTCGTGCACACAGCCCAGCTTGGAG
CGAACGACCTACACCGAACTGAGATACCTACAGCGTGAGCTATGAGAAAG
CGCCACGCTTCCCGAAGGGAGAAAGGCGGACAGGTATCCGGTAAGCGGCA
GGGTCGGAACAGGAGAGCGCACGAGGGAGCTTCCAGGGGGAAACGCCTGG
TATCTTTATAGTCCTGTCGGGTTTCGCCACCTCTGACTTGAGCGTCGATT
TTTGTGATGCTCGTCAGGGGGGCGGAGCCTATGGAAAAACGCCAGCAACG
CGGCCTTTTTACGGTTCCTGGCCTTTTGCTGGCCTTTTGCTCACATGTTC
TTTCCTGCGTTATCCCCTGATTCTGTGGATAACCGTATTACCGCCTTTGA
GTGAGCTGATACCGCTCGCCGCAGCCGAACGACCGAGCGCAGCGAGTCAG
TGAGCGAGGAAGCGGATGAGCGCCCAATACGCAAACCGCCTCTCCCCGCG
CGTTGGCCGATTCATTAATGCAGCTGGCACGACAGGTTTCCCGACTGGAA
AGCGGGCAGTGAGCGCAACGCAATTAATGTGAGTTAGCTCACTCATTAGG
CACCCCAGGCTTTACACTTTATGCTTCCGGCTCGTATGTTGTGTGGAATT
GTGAGCGGATAACAATTTCACACAGGAAACAGCTATGACCATGATTACGC
CAAGCTTGCATGCCTGCAGGTCGACTCTAGAGGATCCCCGGGTACCGAGC
TCGAATTCACTGGCCGTCGTTTTACAACGTCGTGACTGGGAAAACCCTGG
CGTTACCCAACTTAATCGCCTTGCAGCACATCCCCCTTTCGCCAGCTGGC
GTAATAGCGAAGAGGCCCGCACCGATCGCCCTTCCCAACAGTTGCGCAGC
CTGAATGGCGAATGGCGCCTGATGCGGTATTTTCTCCTTACGCATCTGTG
CGGTATTTCACACCGCATATGGTGCACTCTCAGTACAATCTGCTCTGATG
CCGCATAGTTAAGCCAGCCCCGACACCCGCCAACACCCGCTGACGCGCCC
TGACGGGCTTGTCTGCTCCCGGCATCCGCTTACAGACAAGCTGTGAC

[chemical structure]

TGCGCGGAACCCCTATTTGTTTATTTTTCTAAATACATTCAAATATGTAT
CCGCTCATGAGACAATAACCCTGATAAATGCTTCAATAATATTGAAAAAG
GAAGAGTATGCGCTCACGCAACTGGTCCAGAACCTTGACCGAACGCAGCG
GTGGTAACGGCGCAGTGGCGGTTTTCATGGCTTGTTATGACTGTTTTTTTTT
GGGGTACAGTCTATGCCTCGGGCATCCAAGCAGCAAGCGCGTTACGCCGT
GGGTCGATGTTTGATGTTATGGAGCAGCAACGATGTTACGCAGCAGGGCA
GTCGCCCTAAAACAAAGTTAAACATCATGAGGGAAGCGGTGATCGCCGAA
GTATCGACTCAACTATCAGAGGTAGTTGGCGTCATCGAGCGCCATCTCGA
ACCGACGTTGCTGGCCGTACATTTGTACGGCTCCGCAGTGGATGGCGGCC
TGAAGCCACACAGCGATATTGATTTGCTGGTTACGGTGACCGTAAGGCTT
GATGAAACAACGCGGCGAGCTTTGATCAACGACCTTTTGGAAACTTCGGC
TTCCCCTGGAGAGAGCGAGATTCTCCGCGCTGTAGAAGTCACCATTGTTG
TGCACGACGACATCATTCCGTGGCGTTATCCAGCTAAGCGCGAACTGCAA
TTTGGAGAATGGCAGCGCAATGACATTCTTGCAGGTATCTTCGAGCCAGC
CACGATCGACATTGATCTGGCTATCTTGCTGACAAAAGCAAGAGAACATA
GCGTTGCCTTGGTAGGTCCAGCGGCGGAGGAACTCTTTGATCCGGTTCCT
GAACAGGATCTATTTGAGGCGCTAAATGAAACCTTAACGCTATGGAACTC
GCCGCCCGACTGGGCTGGCGATGAGCGAAATGTAGTGCTTACGTTGTCCC
GCATTTGGTACAGCGCAGTAACCGGCAAAATCGCGCCGAAGGATGTCGCT
GCCGACTGGGCAATGGAGCGCCTGCCGGCCCAGTATCAGCCCGTCATACT
TGAAGCTAGACAGGCTTATCTTGGACAAGAAGAAGATCGCTTGGCCTCGC
GCGCAGATCAGTTGGAAGAATTTGTCCATTACGTAAAAGGCGAGATCACC
AAGGTAGTCGGCAAATAAGAGCCTGTTTAATAAGATGATCTTCTTGAGAT
CGTTTTGGTCTGCGCGTAATCTCTTGCTCTGAAAACGAAAAAACCGCCTT
GCAGGGCGGTTTTTCGAAGGTTCTCTGAGCTACCAACTCTTTGAACCGAG
GTAACTGGCTTGGAGGAGCGCAGTCACCAAAACTTGTCCTTTCAGTTTAG
CCTTAACCGGCGCATGACTTCAAGACTAACTCCTCTAAATCAATTACCAG
TGGCTGCTGCCAGTGGTGCTTTTGCATGTCTTTCCGGGTTGGACTCAAGA
CGATAGTTACCGGATAAGGCGCAGCGGTCGGACTGAACGGGGGGTTCGTG
CATACAGTCCAGCTTGGAGCGAACTGCCTACCCGGAACTGAGTGTCAGGC
GTGGAATGAGACAAACGCGGCCATAACAGCGGAATGACACCGGTAAACCG
AAAGGCAGGAACAGGAGAGCGCACGAGGGAGCCGCCAGGGGGAAACGCCT
GGTATCTTTATAGTCCTGTCGGGTTTCGCCACCACTGATTTGAGCGTCAG
ATTTCGTGATGCTTGTCAGGGGGGCGGAGCCTATGGAAAAACGGCTTTGC
CGCGGCCCTCTCACTTCCCTGTTAAGTATCTTCCTGGCATCTTCCAGGAA
ATCTCCGCCCCGTTCGTAAGCCATTTCCGCTCGCCGCAGTCGAACGACCG
AGCGTAGCGAGTCAGTGAGCGAGGAAGCGGAATATATCCTGTATCACATA
TTCTGCTGACGCACCGGTGCAGCCTTTTTTCTCCTGCCACATGAAGCACT
TCACTGACACCCTCATCAGTGCCAACATAGTAAGCCAGTATACACTCCGC
TAGCGCGCAAGCGGCCGCA
>pMXLS_VM
(SEQ ID NO: 35)

[chemical structure]

GTCAGACCAAGTTTACTCAT
ATATACTTTAGATTGATTTAAAACTTCATTTTTAATTTAAAAGGATCTAG
GTGAAGATCCTTTTTGATAATCTCATGACCAAAATCCCTTAACGTGAGTT
TTCGTTCCACTGAGCGTCAGACCCCGTAGAAAAGATCAAAGGATCTTCTT
GAGATCCTTTTTTTCTGCGCGTAATCTGCTGCTTGCAAACAAAAAAACCA
CCGCTACCAGCGGTGGTTTGTTTGCCGGATCAAGAGCTACCAACTCTTTT
TCCGAAGGTAACTGGCTTCAGCAGAGCGCAGATACCAAATACTGTCCTTC
TAGTGTAGCCGTAGTTAGGCCACCACTTCAAGAACTCTGTAGCACCGCCT
ACATACCTCGCTCTGCTAATCCTGTTACCAGTGGCTGCTGCCAGTGGCGA
TAAGTCGTGTCTTACCGGGTTGGACTCAAGACGATAGTTACCGGATAAGG
CGCAGCGGTCGGGCTGAACGGGGGGTTCGTGCACACAGCCCAGCTTGGAG
CGAACGACCTACACCGAACTGAGATACCTACAGCGTGAGCTATGAGAAAG
CGCCACGCTTCCCGAAGGGAGAAAGGCGGACAGGTATCCGGTAAGCGGCA
GGGTCGGAACAGGAGAGCGCACGAGGGAGCTTCCAGGGGGAAACGCCTGG
TATCTTTATAGTCCTGTCGGGTTTCGCCACCTCTGACTTGAGCGTCGATT
TTTGTGATGCTCGTCAGGGGGGCGGAGCCTATGGAAAAACGCCAGCAACG
CGGCCTTTTTACGGTTCCTGGCCTTTTGCTGGCCTTTTGCTCACATGTTC
TTTCCTGCGTTATCCCCTGATTCTGTGGATAACCGTATTACCGCCTTTGA
GTGAGCTGATACCGCTCGCCGCAGCCGAACGACCGAGCGCAGCGAGTCAG
TGAGCGAGGAAGCGGATGAGCGCCCAATACGCAAACCGCCTCTCCCCGCG
CGTTGGCCGATTCATTAATGCAGCTGGCACGACAGGTTTCCCGACTGGAA
AGCGGGCAGTGAGCGCAACGCAATTAATGTGAGTTAGCTCACTCATTAGG
CACCCCAGGCTTTACACTTTATGCTTCCGGCTCGTATGTTGTGTGGAATT
GTGAGCGGATAACAATTTCACACAGGAAACAGCTATGACCATGATTACGC
CAAGCTTGCATGCCTGCAGGTCGACTCTAGAGGATCCCCGGGTACCGAGC
TCGAATTCACTGGCCGTCGTTTTACAACGTCGTGACTGGGAAAACCCTGG
CGTTACCCAACTTAATCGCCTTGCAGCACATCCCCCTTTCGCCAGCTGGC
GTAATAGCGAAGAGGCCCGCACCGATCGCCCTTCCCAACAGTTGCGCAGC
CTGAATGGCGAATGGCGCCTGATGCGGTATTTTCTCCTTACGCATCTGTG
CGGTATTTCACACCGCATATGGTGCACTCTCAGTACAATCTGCTCTGATG
CCGCATAGTTAAGCCAGCCCCGACACCCGCCAACACCCGCTGACGCGCCC
TGACGGGCTTGTCTGCTCCCGGCATCCGCTTACAGACAAGCTGTGAC

[chemical structure]

TGCGCGGAACCCCTATTTGTTTATTTTTCTAAATACATTCAAATATGTAT
CCGCTCATGAGACAATAACCCTGATAAATGCTTCAATAATATTGAAAAAG
GAAGAGTATGCGCTCACGCAACTGGTCCAGAACCTTGACCGAACGCAGCG
GTGGTAACGGCGCAGTGGCGGTTTTCATGGCTTGTTATGACTGTTTTTTTTT
GGGGTACAGTCTATGCCTCGGGCATCCAAGCAGCAAGCGCGTTACGCCGT
GGGTCGATGTTTGATGTTATGGAGCAGCAACGATGTTACGCAGCAGGGCA
GTCGCCCTAAAACAAAGTTAAACATCATGAGGGAAGCGGTGATCGCCGAA
GTATCGACTCAACTATCAGAGGTAGTTGGCGTCATCGAGCGCCATCTCGA
ACCGACGTTGCTGGCCGTACATTTGTACGGCTCCGCAGTGGATGGCGGCC
TGAAGCCACACAGCGATATTGATTTGCTGGTTACGGTGACCGTAAGGCTT
GATGAAACAACGCGGCGAGCTTTGATCAACGACCTTTTGGAAACTTCGGC
TTCCCCTGGAGAGAGCGAGATTCTCCGCGCTGTAGAAGTCACCATTGTTG
TGCACGACGACATCATTCCGTGGCGTTATCCAGCTAAGCGCGAACTGCAA
TTTGGAGAATGGCAGCGCAATGACATTCTTGCAGGTATCTTCGAGCCAGC
CACGATCGACATTGATCTGGCTATCTTGCTGACAAAAGCAAGAGAACATA
GCGTTGCCTTGGTAGGTCCAGCGGCGGAGGAACTCTTTGATCCGGTTCCT
GAACAGGATCTATTTGAGGCGCTAAATGAAACCTTAACGCTATGGAACTC
GCCGCCCGACTGGGCTGGCGATGAGCGAAATGTAGTGCTTACGTTGTCCC
GCATTTGGTACAGCGCAGTAACCGGCAAAATCGCGCCGAAGGATGTCGCT
GCCGACTGGGCAATGGAGCGCCTGCCGGCCCAGTATCAGCCCGTCATACT
TGAAGCTAGACAGGCTTATCTTGGACAAGAAGAAGATCGCTTGGCCTCGC
GCGCAGATCAGTTGGAAGAATTTGTCCATTACGTAAAAGGCGAGATCACC
AAGGTAGTCGGCAAATAAGAGCCTGTTTAATAAGATGATCTTCTTGAGAT
CGTTTTGGTCTGCGCGTAATCTCTTGCTCTGAAAACGAAAAAACCGCCTT
GCAGGGCGGTTTTTCGAAGGTTCTCTGAGCTACCAACTCTTTGAACCGAG
GTAACTGGCTTGGAGGAGCGCAGTCACCAAAACTTGTCCTTTCAGTTTAG
CCTTAACCGGCGCATGACTTCAAGACTAACTCCTCTAAATCAATTACCAG
TGGCTGCTGCCAGTGGTGCTTTTGCATGTCTTTCCGGGTTGGACTCAAGA
CGATAGTTACCGGATAAGGCGCAGCGGTCGGACTGAACGGGGGGTTCGTG
CATACAGTCCAGCTTGGAGCGAACTGCCTACCCGGAACTGAGTGTCAGGC
GTGGAATGAGACAAACGCGGCCATAACAGCGGAATGACACCGGTAAACCG
AAAGGCAGGAACAGGAGAGCGCACGAGGGAGCCGCCAGGGGGAAACGCCT
GGTATCTTTATAGTCCTGTCGGGTTTCGCCACCACTGATTTGAGCGTCAG
ATTTCGTGATGCTTGTCAGGGGGGCGGAGCCTATGGAAAAACGGCTTTGC
CGCGGCCCTCTCACTTCCCTGTTAAGTATCTTCCTGGCATCTTCCAGGAA
ATCTCCGCCCCGTTCGTAAGCCATTTCCGCTCGCCGCAGTCGAACGACCG
AGCGTAGCGAGTCAGTGAGCGAGGAAGCGGAATATATCCTGTATCACATA
TTCTGCTGACGCACCGGTGCAGCCTTTTTTCTCCTGCCACATGAAGCACT
TCACTGACACCCTCATCAGTGCCAACATAGTAAGCCAGTATACACTCCGC
TAGCGCGCAAGCGGCCGCA
>pMXLS_VR
(SEQ ID NO: 36)

[chemical structure]

GTCAGACCAAGTTTACTCAT
ATATACTTTAGATTGATTTAAAACTTCATTTTTAATTTAAAAGGATCTAG
GTGAAGATCCTTTTTGATAATCTCATGACCAAAATCCCTTAACGTGAGTT
TTCGTTCCACTGAGCGTCAGACCCCGTAGAAAAGATCAAAGGATCTTCTT
GAGATCCTTTTTTTCTGCGCGTAATCTGCTGCTTGCAAACAAAAAAACCA
CCGCTACCAGCGGTGGTTTGTTTGCCGGATCAAGAGCTACCAACTCTTTT
TCCGAAGGTAACTGGCTTCAGCAGAGCGCAGATACCAAATACTGTCCTTC
TAGTGTAGCCGTAGTTAGGCCACCACTTCAAGAACTCTGTAGCACCGCCT
ACATACCTCGCTCTGCTAATCCTGTTACCAGTGGCTGCTGCCAGTGGCGA
TAAGTCGTGTCTTACCGGGTTGGACTCAAGACGATAGTTACCGGATAAGG
CGCAGCGGTCGGGCTGAACGGGGGGTTCGTGCACACAGCCCAGCTTGGAG
CGAACGACCTACACCGAACTGAGATACCTACAGCGTGAGCTATGAGAAAG
CGCCACGCTTCCCGAAGGGAGAAAGGCGGACAGGTATCCGGTAAGCGGCA
GGGTCGGAACAGGAGAGCGCACGAGGGAGCTTCCAGGGGGAAACGCCTGG
TATCTTTATAGTCCTGTCGGGTTTCGCCACCTCTGACTTGAGCGTCGATT
TTTGTGATGCTCGTCAGGGGGGCGGAGCCTATGGAAAAACGCCAGCAACG
CGGCCTTTTTACGGTTCCTGGCCTTTTGCTGGCCTTTTGCTCACATGTTC
TTTCCTGCGTTATCCCCTGATTCTGTGGATAACCGTATTACCGCCTTTGA
GTGAGCTGATACCGCTCGCCGCAGCCGAACGACCGAGCGCAGCGAGTCAG
TGAGCGAGGAAGCGGATGAGCGCCCAATACGCAAACCGCCTCTCCCCGCG
CGTTGGCCGATTCATTAATGCAGCTGGCACGACAGGTTTCCCGACTGGAA
AGCGGGCAGTGAGCGCAACGCAATTAATGTGAGTTAGCTCACTCATTAGG
CACCCCAGGCTTTACACTTTATGCTTCCGGCTCGTATGTTGTGTGGAATT
GTGAGCGGATAACAATTTCACACAGGAAACAGCTATGACCATGATTACGC
CAAGCTTGCATGCCTGCAGGTCGACTCTAGAGGATCCCCGGGTACCGAGC
TCGAATTCACTGGCCGTCGTTTTACAACGTCGTGACTGGGAAAACCCTGG
CGTTACCCAACTTAATCGCCTTGCAGCACATCCCCCTTTCGCCAGCTGGC
GTAATAGCGAAGAGGCCCGCACCGATCGCCCTTCCCAACAGTTGCGCAGC
CTGAATGGCGAATGGCGCCTGATGCGGTATTTTCTCCTTACGCATCTGTG
CGGTATTTCACACCGCATATGGTGCACTCTCAGTACAATCTGCTCTGATG
CCGCATAGTTAAGCCAGCCCCGACACCCGCCAACACCCGCTGACGCGCCC
TGACGGGCTTGTCTGCTCCCGGCATCCGCTTACAGACAAGCTGTGAC

[chemical structure]

TGCGCGGAACCCCTATTTGTTTATTTTTCTAAATACATTCAAATATGTAT
CCGCTCATGAGACAATAACCCTGATAAATGCTTCAATAATATTGAAAAAG
GAAGAGTATGCGCTCACGCAACTGGTCCAGAACCTTGACCGAACGCAGCG
GTGGTAACGGCGCAGTGGCGGTTTTCATGGCTTGTTATGACTGTTTTTTTTT
GGGGTACAGTCTATGCCTCGGGCATCCAAGCAGCAAGCGCGTTACGCCGT
GGGTCGATGTTTGATGTTATGGAGCAGCAACGATGTTACGCAGCAGGGCA
GTCGCCCTAAAACAAAGTTAAACATCATGAGGGAAGCGGTGATCGCCGAA
GTATCGACTCAACTATCAGAGGTAGTTGGCGTCATCGAGCGCCATCTCGA
ACCGACGTTGCTGGCCGTACATTTGTACGGCTCCGCAGTGGATGGCGGCC
TGAAGCCACACAGCGATATTGATTTGCTGGTTACGGTGACCGTAAGGCTT
GATGAAACAACGCGGCGAGCTTTGATCAACGACCTTTTGGAAACTTCGGC
TTCCCCTGGAGAGAGCGAGATTCTCCGCGCTGTAGAAGTCACCATTGTTG
TGCACGACGACATCATTCCGTGGCGTTATCCAGCTAAGCGCGAACTGCAA
TTTGGAGAATGGCAGCGCAATGACATTCTTGCAGGTATCTTCGAGCCAGC
CACGATCGACATTGATCTGGCTATCTTGCTGACAAAAGCAAGAGAACATA
GCGTTGCCTTGGTAGGTCCAGCGGCGGAGGAACTCTTTGATCCGGTTCCT
GAACAGGATCTATTTGAGGCGCTAAATGAAACCTTAACGCTATGGAACTC
GCCGCCCGACTGGGCTGGCGATGAGCGAAATGTAGTGCTTACGTTGTCCC
GCATTTGGTACAGCGCAGTAACCGGCAAAATCGCGCCGAAGGATGTCGCT
GCCGACTGGGCAATGGAGCGCCTGCCGGCCCAGTATCAGCCCGTCATACT
TGAAGCTAGACAGGCTTATCTTGGACAAGAAGAAGATCGCTTGGCCTCGC
GCGCAGATCAGTTGGAAGAATTTGTCCATTACGTAAAAGGCGAGATCACC
AAGGTAGTCGGCAAATAAGAGCCTGTTTAATAAGATGATCTTCTTGAGAT
CGTTTTGGTCTGCGCGTAATCTCTTGCTCTGAAAACGAAAAAACCGCCTT
GCAGGGCGGTTTTTCGAAGGTTCTCTGAGCTACCAACTCTTTGAACCGAG
GTAACTGGCTTGGAGGAGCGCAGTCACCAAAACTTGTCCTTTCAGTTTAG
CCTTAACCGGCGCATGACTTCAAGACTAACTCCTCTAAATCAATTACCAG
TGGCTGCTGCCAGTGGTGCTTTTGCATGTCTTTCCGGGTTGGACTCAAGA
CGATAGTTACCGGATAAGGCGCAGCGGTCGGACTGAACGGGGGGTTCGTG
CATACAGTCCAGCTTGGAGCGAACTGCCTACCCGGAACTGAGTGTCAGGC
GTGGAATGAGACAAACGCGGCCATAACAGCGGAATGACACCGGTAAACCG
AAAGGCAGGAACAGGAGAGCGCACGAGGGAGCCGCCAGGGGGAAACGCCT
GGTATCTTTATAGTCCTGTCGGGTTTCGCCACCACTGATTTGAGCGTCAG
ATTTCGTGATGCTTGTCAGGGGGGCGGAGCCTATGGAAAAACGGCTTTGC
CGCGGCCCTCTCACTTCCCTGTTAAGTATCTTCCTGGCATCTTCCAGGAA
ATCTCCGCCCCGTTCGTAAGCCATTTCCGCTCGCCGCAGTCGAACGACCG
AGCGTAGCGAGTCAGTGAGCGAGGAAGCGGAATATATCCTGTATCACATA
TTCTGCTGACGCACCGGTGCAGCCTTTTTTCTCCTGCCACATGAAGCACT
TCACTGACACCCTCATCAGTGCCAACATAGTAAGCCAGTATACACTCCGC
TAGCGCGCAAGCGGCCGCA
>pMZLS_VL
(SEQ ID NO: 37)

[chemical structure]

GGTCAGACCAAGTTTACTCAT
ATATACTTTAGATTGATTTAAAACTTCATTTTTAATTTAAAAGGATCTAG
GTGAAGATCCTTTTTGATAATCTCATGACCAAAATCCCTTAACGTGAGTT
TTCGTTCCACTGAGCGTCAGACCCCGTAGAAAAGATCAAAGGATCTTCTT
GAGATCCTTTTTTTCTGCGCGTAATCTGCTGCTTGCAAACAAAAAAACCA
CCGCTACCAGCGGTGGTTTGTTTGCCGGATCAAGAGCTACCAACTCTTTT
TCCGAAGGTAACTGGCTTCAGCAGAGCGCAGATACCAAATACTGTCCTTC
TAGTGTAGCCGTAGTTAGGCCACCACTTCAAGAACTCTGTAGCACCGCCT
ACATACCTCGCTCTGCTAATCCTGTTACCAGTGGCTGCTGCCAGTGGCGA
TAAGTCGTGTCTTACCGGGTTGGACTCAAGACGATAGTTACCGGATAAGG
CGCAGCGGTCGGGCTGAACGGGGGGTTCGTGCACACAGCCCAGCTTGGAG
CGAACGACCTACACCGAACTGAGATACCTACAGCGTGAGCTATGAGAAAG
CGCCACGCTTCCCGAAGGGAGAAAGGCGGACAGGTATCCGGTAAGCGGCA
GGGTCGGAACAGGAGAGCGCACGAGGGAGCTTCCAGGGGGAAACGCCTGG
TATCTTTATAGTCCTGTCGGGTTTCGCCACCTCTGACTTGAGCGTCGATT
TTTGTGATGCTCGTCAGGGGGGCGGAGCCTATGGAAAAACGCCAGCAACG
CGGCCTTTTTACGGTTCCTGGCCTTTTGCTGGCCTTTTGCTCACATGTTC
TTTCCTGCGTTATCCCCTGATTCTGTGGATAACCGTATTACCGCCTTTGA
GTGAGCTGATACCGCTCGCCGCAGCCGAACGACCGAGCGCAGCGAGTCAG
TGAGCGAGGAAGCGGATGAGCGCCCAATACGCAAACCGCCTCTCCCCGCG
CGTTGGCCGATTCATTAATGCAGCTGGCACGACAGGTTTCCCGACTGGAA
AGCGGGCAGTGAGCGCAACGCAATTAATGTGAGTTAGCTCACTCATTAGG
CACCCCAGGCTTTACACTTTATGCTTCCGGCTCGTATGTTGTGTGGAATT
GTGAGCGGATAACAATTTCACACAGGAAACAGCTATGACCATGATTACGC
CAAGCTTGCATGCCTGCAGGTCGACTCTAGAGGATCCCCGGGTACCGAGC
TCGAATTCACTGGCCGTCGTTTTACAACGTCGTGACTGGGAAAACCCTGG
CGTTACCCAACTTAATCGCCTTGCAGCACATCCCCCTTTCGCCAGCTGGC
GTAATAGCGAAGAGGCCCGCACCGATCGCCCTTCCCAACAGTTGCGCAGC
CTGAATGGCGAATGGCGCCTGATGCGGTATTTTCTCCTTACGCATCTGTG
CGGTATTTCACACCGCATATGGTGCACTCTCAGTACAATCTGCTCTGATG
CCGCATAGTTAAGCCAGCCCCGACACCCGCCAACACCCGCTGACGCGCCC
TGACGGGCTTGTCTGCTCCCGGCATCCGCTTACAGACAAGCTGTGACC

[chemical structure]

TGCGCGGAACCCCTATTTGTTTATTTTTCTAAATACATTCAAATATGTAT
CCGCTCATGAGACAATAACCCTGATAAATGCTTCAATAATATTGAAAAAG
GAAGAGTATGCGCTCACGCAACTGGTCCAGAACCTTGACCGAACGCAGCG
GTGGTAACGGCGCAGTGGCGGTTTTCATGGCTTGTTATGACTGTTTTTTTTT
GGGGTACAGTCTATGCCTCGGGCATCCAAGCAGCAAGCGCGTTACGCCGT
GGGTCGATGTTTGATGTTATGGAGCAGCAACGATGTTACGCAGCAGGGCA
GTCGCCCTAAAACAAAGTTAAACATCATGAGGGAAGCGGTGATCGCCGAA
GTATCGACTCAACTATCAGAGGTAGTTGGCGTCATCGAGCGCCATCTCGA
ACCGACGTTGCTGGCCGTACATTTGTACGGCTCCGCAGTGGATGGCGGCC
TGAAGCCACACAGCGATATTGATTTGCTGGTTACGGTGACCGTAAGGCTT
GATGAAACAACGCGGCGAGCTTTGATCAACGACCTTTTGGAAACTTCGGC
TTCCCCTGGAGAGAGCGAGATTCTCCGCGCTGTAGAAGTCACCATTGTTG
TGCACGACGACATCATTCCGTGGCGTTATCCAGCTAAGCGCGAACTGCAA
TTTGGAGAATGGCAGCGCAATGACATTCTTGCAGGTATCTTCGAGCCAGC
CACGATCGACATTGATCTGGCTATCTTGCTGACAAAAGCAAGAGAACATA
GCGTTGCCTTGGTAGGTCCAGCGGCGGAGGAACTCTTTGATCCGGTTCCT
GAACAGGATCTATTTGAGGCGCTAAATGAAACCTTAACGCTATGGAACTC
GCCGCCCGACTGGGCTGGCGATGAGCGAAATGTAGTGCTTACGTTGTCCC
GCATTTGGTACAGCGCAGTAACCGGCAAAATCGCGCCGAAGGATGTCGCT
GCCGACTGGGCAATGGAGCGCCTGCCGGCCCAGTATCAGCCCGTCATACT
TGAAGCTAGACAGGCTTATCTTGGACAAGAAGAAGATCGCTTGGCCTCGC
GCGCAGATCAGTTGGAAGAATTTGTCCATTACGTAAAAGGCGAGATCACC
AAGGTAGTCGGCAAATAAGAGCCTGTTTAATAAGATGATCTTCTTGAGAT
CGTTTTGGTCTGCGCGTAATCTCTTGCTCTGAAAACGAAAAAACCGCCTT
GCAGGGCGGTTTTTCGAAGGTTCTCTGAGCTACCAACTCTTTGAACCGAG
GTAACTGGCTTGGAGGAGCGCAGTCACCAAAACTTGTCCTTTCAGTTTAG
CCTTAACCGGCGCATGACTTCAAGACTAACTCCTCTAAATCAATTACCAG
TGGCTGCTGCCAGTGGTGCTTTTGCATGTCTTTCCGGGTTGGACTCAAGA
CGATAGTTACCGGATAAGGCGCAGCGGTCGGACTGAACGGGGGGTTCGTG
CATACAGTCCAGCTTGGAGCGAACTGCCTACCCGGAACTGAGTGTCAGGC
GTGGAATGAGACAAACGCGGCCATAACAGCGGAATGACACCGGTAAACCG
AAAGGCAGGAACAGGAGAGCGCACGAGGGAGCCGCCAGGGGGAAACGCCT
GGTATCTTTATAGTCCTGTCGGGTTTCGCCACCACTGATTTGAGCGTCAG
ATTTCGTGATGCTTGTCAGGGGGGCGGAGCCTATGGAAAAACGGCTTTGC
CGCGGCCCTCTCACTTCCCTGTTAAGTATCTTCCTGGCATCTTCCAGGAA
ATCTCCGCCCCGTTCGTAAGCCATTTCCGCTCGCCGCAGTCGAACGACCG
AGCGTAGCGAGTCAGTGAGCGAGGAAGCGGAATATATCCTGTATCACATA
TTCTGCTGACGCACCGGTGCAGCCTTTTTTCTCCTGCCACATGAAGCACT
TCACTGACACCCTCATCAGTGCCAACATAGTAAGCCAGTATACACTCCGC
TAGCGCGCAAGCGGCCGCA
>pMZLS_VM
(SEQ ID NO: 38)

[chemical structure]

GGTCAGACCAAGTTTACTCAT
ATATACTTTAGATTGATTTAAAACTTCATTTTTAATTTAAAAGGATCTAG
GTGAAGATCCTTTTTGATAATCTCATGACCAAAATCCCTTAACGTGAGTT
TTCGTTCCACTGAGCGTCAGACCCCGTAGAAAAGATCAAAGGATCTTCTT
GAGATCCTTTTTTTCTGCGCGTAATCTGCTGCTTGCAAACAAAAAAACCA
CCGCTACCAGCGGTGGTTTGTTTGCCGGATCAAGAGCTACCAACTCTTTT
TCCGAAGGTAACTGGCTTCAGCAGAGCGCAGATACCAAATACTGTCCTTC
TAGTGTAGCCGTAGTTAGGCCACCACTTCAAGAACTCTGTAGCACCGCCT
ACATACCTCGCTCTGCTAATCCTGTTACCAGTGGCTGCTGCCAGTGGCGA
TAAGTCGTGTCTTACCGGGTTGGACTCAAGACGATAGTTACCGGATAAGG
CGCAGCGGTCGGGCTGAACGGGGGGTTCGTGCACACAGCCCAGCTTGGAG
CGAACGACCTACACCGAACTGAGATACCTACAGCGTGAGCTATGAGAAAG
CGCCACGCTTCCCGAAGGGAGAAAGGCGGACAGGTATCCGGTAAGCGGCA
GGGTCGGAACAGGAGAGCGCACGAGGGAGCTTCCAGGGGGAAACGCCTGG
TATCTTTATAGTCCTGTCGGGTTTCGCCACCTCTGACTTGAGCGTCGATT
TTTGTGATGCTCGTCAGGGGGGCGGAGCCTATGGAAAAACGCCAGCAACG
CGGCCTTTTTACGGTTCCTGGCCTTTTGCTGGCCTTTTGCTCACATGTTC
TTTCCTGCGTTATCCCCTGATTCTGTGGATAACCGTATTACCGCCTTTGA
GTGAGCTGATACCGCTCGCCGCAGCCGAACGACCGAGCGCAGCGAGTCAG
TGAGCGAGGAAGCGGATGAGCGCCCAATACGCAAACCGCCTCTCCCCGCG
CGTTGGCCGATTCATTAATGCAGCTGGCACGACAGGTTTCCCGACTGGAA
AGCGGGCAGTGAGCGCAACGCAATTAATGTGAGTTAGCTCACTCATTAGG
CACCCCAGGCTTTACACTTTATGCTTCCGGCTCGTATGTTGTGTGGAATT
GTGAGCGGATAACAATTTCACACAGGAAACAGCTATGACCATGATTACGC
CAAGCTTGCATGCCTGCAGGTCGACTCTAGAGGATCCCCGGGTACCGAGC
TCGAATTCACTGGCCGTCGTTTTACAACGTCGTGACTGGGAAAACCCTGG
CGTTACCCAACTTAATCGCCTTGCAGCACATCCCCCTTTCGCCAGCTGGC
GTAATAGCGAAGAGGCCCGCACCGATCGCCCTTCCCAACAGTTGCGCAGC
CTGAATGGCGAATGGCGCCTGATGCGGTATTTTCTCCTTACGCATCTGTG
CGGTATTTCACACCGCATATGGTGCACTCTCAGTACAATCTGCTCTGATG
CCGCATAGTTAAGCCAGCCCCGACACCCGCCAACACCCGCTGACGCGCCC
TGACGGGCTTGTCTGCTCCCGGCATCCGCTTACAGACAAGCTGTGACC

[chemical structure]

TGCGCGGAACCCCTATTTGTTTATTTTTCTAAATACATTCAAATATGTAT
CCGCTCATGAGACAATAACCCTGATAAATGCTTCAATAATATTGAAAAAG
GAAGAGTATGCGCTCACGCAACTGGTCCAGAACCTTGACCGAACGCAGCG
GTGGTAACGGCGCAGTGGCGGTTTTCATGGCTTGTTATGACTGTTTTTTTTT
GGGGTACAGTCTATGCCTCGGGCATCCAAGCAGCAAGCGCGTTACGCCGT
GGGTCGATGTTTGATGTTATGGAGCAGCAACGATGTTACGCAGCAGGGCA
GTCGCCCTAAAACAAAGTTAAACATCATGAGGGAAGCGGTGATCGCCGAA
GTATCGACTCAACTATCAGAGGTAGTTGGCGTCATCGAGCGCCATCTCGA
ACCGACGTTGCTGGCCGTACATTTGTACGGCTCCGCAGTGGATGGCGGCC
TGAAGCCACACAGCGATATTGATTTGCTGGTTACGGTGACCGTAAGGCTT
GATGAAACAACGCGGCGAGCTTTGATCAACGACCTTTTGGAAACTTCGGC
TTCCCCTGGAGAGAGCGAGATTCTCCGCGCTGTAGAAGTCACCATTGTTG
TGCACGACGACATCATTCCGTGGCGTTATCCAGCTAAGCGCGAACTGCAA
TTTGGAGAATGGCAGCGCAATGACATTCTTGCAGGTATCTTCGAGCCAGC
CACGATCGACATTGATCTGGCTATCTTGCTGACAAAAGCAAGAGAACATA
GCGTTGCCTTGGTAGGTCCAGCGGCGGAGGAACTCTTTGATCCGGTTCCT
GAACAGGATCTATTTGAGGCGCTAAATGAAACCTTAACGCTATGGAACTC
GCCGCCCGACTGGGCTGGCGATGAGCGAAATGTAGTGCTTACGTTGTCCC
GCATTTGGTACAGCGCAGTAACCGGCAAAATCGCGCCGAAGGATGTCGCT
GCCGACTGGGCAATGGAGCGCCTGCCGGCCCAGTATCAGCCCGTCATACT
TGAAGCTAGACAGGCTTATCTTGGACAAGAAGAAGATCGCTTGGCCTCGC
GCGCAGATCAGTTGGAAGAATTTGTCCATTACGTAAAAGGCGAGATCACC
AAGGTAGTCGGCAAATAAGAGCCTGTTTAATAAGATGATCTTCTTGAGAT
CGTTTTGGTCTGCGCGTAATCTCTTGCTCTGAAAACGAAAAAACCGCCTT
GCAGGGCGGTTTTTCGAAGGTTCTCTGAGCTACCAACTCTTTGAACCGAG
GTAACTGGCTTGGAGGAGCGCAGTCACCAAAACTTGTCCTTTCAGTTTAG
CCTTAACCGGCGCATGACTTCAAGACTAACTCCTCTAAATCAATTACCAG
TGGCTGCTGCCAGTGGTGCTTTTGCATGTCTTTCCGGGTTGGACTCAAGA
CGATAGTTACCGGATAAGGCGCAGCGGTCGGACTGAACGGGGGGTTCGTG
CATACAGTCCAGCTTGGAGCGAACTGCCTACCCGGAACTGAGTGTCAGGC
GTGGAATGAGACAAACGCGGCCATAACAGCGGAATGACACCGGTAAACCG
AAAGGCAGGAACAGGAGAGCGCACGAGGGAGCCGCCAGGGGGAAACGCCT
GGTATCTTTATAGTCCTGTCGGGTTTCGCCACCACTGATTTGAGCGTCAG
ATTTCGTGATGCTTGTCAGGGGGGCGGAGCCTATGGAAAAACGGCTTTGC
CGCGGCCCTCTCACTTCCCTGTTAAGTATCTTCCTGGCATCTTCCAGGAA
ATCTCCGCCCCGTTCGTAAGCCATTTCCGCTCGCCGCAGTCGAACGACCG
AGCGTAGCGAGTCAGTGAGCGAGGAAGCGGAATATATCCTGTATCACATA
TTCTGCTGACGCACCGGTGCAGCCTTTTTTCTCCTGCCACATGAAGCACT
TCACTGACACCCTCATCAGTGCCAACATAGTAAGCCAGTATACACTCCGC
TAGCGCGCAAGCGGCCGCA
>pMZLS_VR
(SEQ ID NO: 39)

[chemical structure]

GGTCAGACCAAGTTTACTCAT
ATATACTTTAGATTGATTTAAAACTTCATTTTTAATTTAAAAGGATCTAG
GTGAAGATCCTTTTTGATAATCTCATGACCAAAATCCCTTAACGTGAGTT
TTCGTTCCACTGAGCGTCAGACCCCGTAGAAAAGATCAAAGGATCTTCTT
GAGATCCTTTTTTTCTGCGCGTAATCTGCTGCTTGCAAACAAAAAAACCA
CCGCTACCAGCGGTGGTTTGTTTGCCGGATCAAGAGCTACCAACTCTTTT
TCCGAAGGTAACTGGCTTCAGCAGAGCGCAGATACCAAATACTGTCCTTC
TAGTGTAGCCGTAGTTAGGCCACCACTTCAAGAACTCTGTAGCACCGCCT
ACATACCTCGCTCTGCTAATCCTGTTACCAGTGGCTGCTGCCAGTGGCGA
TAAGTCGTGTCTTACCGGGTTGGACTCAAGACGATAGTTACCGGATAAGG
CGCAGCGGTCGGGCTGAACGGGGGGTTCGTGCACACAGCCCAGCTTGGAG
CGAACGACCTACACCGAACTGAGATACCTACAGCGTGAGCTATGAGAAAG
CGCCACGCTTCCCGAAGGGAGAAAGGCGGACAGGTATCCGGTAAGCGGCA
GGGTCGGAACAGGAGAGCGCACGAGGGAGCTTCCAGGGGGAAACGCCTGG
TATCTTTATAGTCCTGTCGGGTTTCGCCACCTCTGACTTGAGCGTCGATT
TTTGTGATGCTCGTCAGGGGGGCGGAGCCTATGGAAAAACGCCAGCAACG
CGGCCTTTTTACGGTTCCTGGCCTTTTGCTGGCCTTTTGCTCACATGTTC
TTTCCTGCGTTATCCCCTGATTCTGTGGATAACCGTATTACCGCCTTTGA
GTGAGCTGATACCGCTCGCCGCAGCCGAACGACCGAGCGCAGCGAGTCAG
TGAGCGAGGAAGCGGATGAGCGCCCAATACGCAAACCGCCTCTCCCCGCG
CGTTGGCCGATTCATTAATGCAGCTGGCACGACAGGTTTCCCGACTGGAA
AGCGGGCAGTGAGCGCAACGCAATTAATGTGAGTTAGCTCACTCATTAGG
CACCCCAGGCTTTACACTTTATGCTTCCGGCTCGTATGTTGTGTGGAATT
GTGAGCGGATAACAATTTCACACAGGAAACAGCTATGACCATGATTACGC
CAAGCTTGCATGCCTGCAGGTCGACTCTAGAGGATCCCCGGGTACCGAGC
TCGAATTCACTGGCCGTCGTTTTACAACGTCGTGACTGGGAAAACCCTGG
CGTTACCCAACTTAATCGCCTTGCAGCACATCCCCCTTTCGCCAGCTGGC
GTAATAGCGAAGAGGCCCGCACCGATCGCCCTTCCCAACAGTTGCGCAGC
CTGAATGGCGAATGGCGCCTGATGCGGTATTTTCTCCTTACGCATCTGTG
CGGTATTTCACACCGCATATGGTGCACTCTCAGTACAATCTGCTCTGATG
CCGCATAGTTAAGCCAGCCCCGACACCCGCCAACACCCGCTGACGCGCCC
TGACGGGCTTGTCTGCTCCCGGCATCCGCTTACAGACAAGCTGTGACC

[chemical structure]

TGCGCGGAACCCCTATTTGTTTATTTTTCTAAATACATTCAAATATGTAT
CCGCTCATGAGACAATAACCCTGATAAATGCTTCAATAATATTGAAAAAG
GAAGAGTATGCGCTCACGCAACTGGTCCAGAACCTTGACCGAACGCAGCG
GTGGTAACGGCGCAGTGGCGGTTTTCATGGCTTGTTATGACTGTTTTTTTTT
GGGGTACAGTCTATGCCTCGGGCATCCAAGCAGCAAGCGCGTTACGCCGT
GGGTCGATGTTTGATGTTATGGAGCAGCAACGATGTTACGCAGCAGGGCA
GTCGCCCTAAAACAAAGTTAAACATCATGAGGGAAGCGGTGATCGCCGAA
GTATCGACTCAACTATCAGAGGTAGTTGGCGTCATCGAGCGCCATCTCGA
ACCGACGTTGCTGGCCGTACATTTGTACGGCTCCGCAGTGGATGGCGGCC
TGAAGCCACACAGCGATATTGATTTGCTGGTTACGGTGACCGTAAGGCTT
GATGAAACAACGCGGCGAGCTTTGATCAACGACCTTTTGGAAACTTCGGC
TTCCCCTGGAGAGAGCGAGATTCTCCGCGCTGTAGAAGTCACCATTGTTG
TGCACGACGACATCATTCCGTGGCGTTATCCAGCTAAGCGCGAACTGCAA
TTTGGAGAATGGCAGCGCAATGACATTCTTGCAGGTATCTTCGAGCCAGC
CACGATCGACATTGATCTGGCTATCTTGCTGACAAAAGCAAGAGAACATA
GCGTTGCCTTGGTAGGTCCAGCGGCGGAGGAACTCTTTGATCCGGTTCCT
GAACAGGATCTATTTGAGGCGCTAAATGAAACCTTAACGCTATGGAACTC
GCCGCCCGACTGGGCTGGCGATGAGCGAAATGTAGTGCTTACGTTGTCCC
GCATTTGGTACAGCGCAGTAACCGGCAAAATCGCGCCGAAGGATGTCGCT
GCCGACTGGGCAATGGAGCGCCTGCCGGCCCAGTATCAGCCCGTCATACT
TGAAGCTAGACAGGCTTATCTTGGACAAGAAGAAGATCGCTTGGCCTCGC
GCGCAGATCAGTTGGAAGAATTTGTCCATTACGTAAAAGGCGAGATCACC
AAGGTAGTCGGCAAATAAGAGCCTGTTTAATAAGATGATCTTCTTGAGAT
CGTTTTGGTCTGCGCGTAATCTCTTGCTCTGAAAACGAAAAAACCGCCTT
GCAGGGCGGTTTTTCGAAGGTTCTCTGAGCTACCAACTCTTTGAACCGAG
GTAACTGGCTTGGAGGAGCGCAGTCACCAAAACTTGTCCTTTCAGTTTAG
CCTTAACCGGCGCATGACTTCAAGACTAACTCCTCTAAATCAATTACCAG
TGGCTGCTGCCAGTGGTGCTTTTGCATGTCTTTCCGGGTTGGACTCAAGA
CGATAGTTACCGGATAAGGCGCAGCGGTCGGACTGAACGGGGGGTTCGTG
CATACAGTCCAGCTTGGAGCGAACTGCCTACCCGGAACTGAGTGTCAGGC
GTGGAATGAGACAAACGCGGCCATAACAGCGGAATGACACCGGTAAACCG
AAAGGCAGGAACAGGAGAGCGCACGAGGGAGCCGCCAGGGGGAAACGCCT
GGTATCTTTATAGTCCTGTCGGGTTTCGCCACCACTGATTTGAGCGTCAG
ATTTCGTGATGCTTGTCAGGGGGGCGGAGCCTATGGAAAAACGGCTTTGC
CGCGGCCCTCTCACTTCCCTGTTAAGTATCTTCCTGGCATCTTCCAGGAA
ATCTCCGCCCCGTTCGTAAGCCATTTCCGCTCGCCGCAGTCGAACGACCG
AGCGTAGCGAGTCAGTGAGCGAGGAAGCGGAATATATCCTGTATCACATA
TTCTGCTGACGCACCGGTGCAGCCTTTTTTCTCCTGCCACATGAAGCACT
TCACTGACACCCTCATCAGTGCCAACATAGTAAGCCAGTATACACTCCGC
TAGCGCGCAAGCGGCCGCA
>pMXP_A4E
(SEQ ID NO: 40)

[chemical structure]

TTTCCCGACTGGAAAGCGGGCAGTGAGCGCAACGCAATTAATGTGAGTTA
GCTCACTCATTAGGCACCCCAGGCTTTACACTTTATGCTTCCGGCTCGTA
TGTTGTGTGGAATTGTGAGCGGATAACAATTTCACACAGGAAACAGCTAT
GACCATGATTACGCCAAGCTTGCATGCCTGCAGGTCGACTCTAGAGGATC
CCCGGGTACCGAGCTCGAATTCACTGGCCGTCGTTTTACAACGTCGTGAC
TGGGAAAACCCTGGCGTTACCCAACTTAATCGCCTTGCAGCACATCCCCC
TTTCGCCAGCTGGCGTAATAGCGAAGAGGCCCGCACCGATCGCCCTTCCC
AACAGTTGCGCAGCCTGAATGGCGAATGGCGCCTGATGCGGTATTTTCTC
CTTACGCATCTGTGCGGTATTTCACACCGCATATGGTGCACTCTCAGTAC
AATCTGCTCTGATGCCGCATAGTTAAGCCAGCCCCGACACCCGCCAACAC
CCGCTGACGCGCCCTGACGGGCTTGTCTGCTCCCGGCATCCGCTTACAGA

[chemical structure]

ACTATCAGTGTTTGACAGGATATATTGGCGGGTAAACCTAAGAGAAAAGA
GCGTTTATTAGAATAATCGGATATTTAAAAGGGCGTGAAAAGGTTTATCC
GTTCGTCCATTTGTATGTGCATGCCAACCACAGGGTTCCCCAGATCAGGC
GCTGGCTGCTGAACCCCCAGCCGGAACTGACCCCACAAGGCCCTAGCGTT
TGCAATGCACCAGGTCATCATTGACCCAGGCGTGTTCCACCAGGCCGCTG
CCTCGCAACTCTTCGCAGGCTTCGCCGACCTGCTCGCGCCACTTCTTCAC
GCGGGTGGAATCCGATCCGCACATGAGGCGGAAGGTTTCCAGCTTGAGCG
GGTACGGCTCCCGGTGCGAGCTGAAATAGTCGAACATCCGTCGGGCCGTC
GGCGACAGCTTGCGGTACTTCTCCCATATGAATTTCGTGTAGTGGTCGCC
AGCAAACAGCACGACGATTTCCTCGTCGATCAGGACCTGGCAACGGGACG
TTTTCTTGCCACGGTCCAGGACGCGGAAGCGGTGCAGCAGCGACACCGAT
TCCAGGTGCCCAACGCGGTCGGACGTGAAGCCCATCGCCGTCGCCTGTAG
GCGCGACAGGCATTCCTCGGCCTTCGTGTAATACCGGCCATTGATCGACC
AGCCCAGGTCCTGGCAAAGCTCGTAGAACGTGAAGGTGATCGGCTCGCCG
ATAGGGGTGCGCTTCGCGTACTCCAACACCTGCTGCCACACCAGTTCGTC
ATCGTCGGCCCGCAGCTCGACGCCGGTGTAGGTGATCTTCACGTCCTTGT
TGACGTGGAAAATGACCTTGTTTTGCAGCGCCTCGCGCGGGATTTTCTTG
TTGCGCGTGGTGAACAGGGCAGAGCGGGCCGTGTCGTTTGGCATCGCTCG
CATCGTGTCCGGCCACGGCGCAATATCGAACAAGGAAAGCTGCATTTCCT
TGATCTGCTGCTTCGTGTGTTTCAGCAACGCGGCCTGCTTGGCCTCGCTG
ACCTGTTTTGCCAGGTCCTCGCCGGCGGTTTTTCGCTTCTTGGTCGTCAT
AGTTCCTCGCGTGTCGATGGTCATCGACTTCGCCAAACCTGCCGCCTCCT
GTTCAAGACGACGCGAACGCTCCACGGCGGCCGATGGCGCGGGCAGGGCA
GGGGGAGCCAGTTGCACGCTGTCGCGCTCGATCTTGGCCGTAGCTTGCTG
GACCATCGAGCCGACGGACTGGAAGGTTTCGCGGGGCGCACGCATGACGG
TGCGGCTTGCGATGGTTTCGGCATCCTCGGCGGAAAACCCCGCGTCGATC
AGTTCTTGCCTGTATGCCTTCCGGTCAAACGTCCGATTCATTCACCCTCC
TTGCGGGATTGCCCCGACTCACGCCGGGGCAATGTGCCCTTATTCCTGAT
TTGACCCGCCTGGTGCCTTGGTGTCCAGATAATCCACCTTATCGGCAATG
AAGTCGGTCCCGTAGACCGTCTGGCCGTCCTTCTCGTACTTGGTATTCCG
AATCTTGCCCTGCACGAATACCAGCGACCCCTTGCCCAAATACTTGCCGT
GGGCCTCGGCCTGAGAGCCAAAACACTTGATGCGGAAGAAGTCGGTGCGC
TCCTGCTTGTCGCCGGCATCGTTGCGCCACATCTAGGATCTGCCAGGAAC
CGTAAAAAGGCCGCGTTGCTGGCGTTTTTCCATAGGCTCCGCCCCCCTGA
CGAGCATCACAAAAATCGACGCTCAAGTCAGAGGTGGCGAAACCCGACAG
GACTATAAAGATACCAGGCGTTTCCCCCTGGAAGCTCCCTCGTGCGCTCT
CCTGTTCCGACCCTGCCGCTTACCGGATACCTGTCCGCCTTTCTCCCTTC
GGGAAGCGTGGCGCTTTCTCATAGCTCACGCTGTAGGTATCTCAGTTCGG
TGTAGGTCGTTCGCTCCAAGCTGGGCTGTGTGCACGAACCCCCCGTTCAG
CCCGACCGCTGCGCCTTATCCGGTAACTATCGTCTTGAGTCCAACCCGGT
AAGACACGACTTATCGCCACTGGCAGCAGCCACTGGTAACAGGATTAGCA
GAGCGAGGTATGTAGGCGGTGCTACAGAGTTCTTGAAGTGGTGGCCTAAC
TACGGCTACACTAGAAGGACAGTATTTGGTATCTGCGCTCTGCTGAAGCC
AGTTACCTTCGGAAAAAGAGTTGGTAGCTCTTGATCCGGCAAACAAACCA
CCGCTGGTAGCGGTGGTTTTTTTGTTTGCAAGCAGCAGATTACGCGCAGA
AAAAAAGGATCTCAAGAAGATCCTTTGATCTTTTCTACGGGGTCTGACGC
TCAGTGGAACGAAAACTCACGTTAAGGGATTTTGGTCATGAGATTATCAA
AAAGGATCTTCACCTAGATCCTTTTAAATTAAAAATGAAGTTTTAAATCA
ATCTAAAGTATATATGAGTAAACTTGGTCTGACAGTTACCAATGCTTAAT
CAGTGAGGCACCTATCTCAGCGATCTGTCTATTTCGTTCATCCATAGTTG
CCTGACTCCCCGTCGTGTAGATAACTACGATACGGGAGGGCTTACCATCT
GGCCCCAGTGCTGCAATGATACCGCGAGAACCACGCTCACCGGCTCCAGA
TTTATCAGCAATAAACCAGCCAGCCGGAAGGGCCGAGCGCAGAAGTGGTC
CTGCAACTTTATCCGCCTCCATCCAGTCTATTAATTGTTGCCGGGAAGCT
AGAGTAAGTAGTTCGCCAGTTAATAGTTTGCGCAACGTTGTTGCCATTGC
TACAGGCATCGTGGTGTCACGCTCGTCGTTTGGTATGGCTTCATTCAGCT
CCGGTTCCCAACGATCAAGGCGAGTTACATGATCCCCCATGTTGTGCAAA
AAAGCGGTTAGCTCCTTCGGTCCTCCGATCGTTGTCAGAAGTAAGTTGGC
CGCAGTGTTATCACTCATGGTTATGGCAGCACTGCATAATTCTCTTACTG
TCATGCCATCCGTAAGATGCTTTTCTGTGACTGGTGAGTACTCAACCAAG
TCATTCTGAGAATAGTGTATGCGGCGACCGAGTTGCTCTTGCCCGGCGTC
AATACGGGATAATACCGCGCCACATAGCAGAACTTTAAAAGTGCTCATCA
TTGGAAAACGTTCTTCGGGGCGAAAACTCTCAAGGATCTTACCGCTGTTG
AGATCCAGTTCGATGTAACCCACTCGTGCACCCAACTGATCTTCAGCATC
TTTTACTTTCACCAGCGTTTCTGGGTGAGCAAAAACAGGAAGGCAAAATG
CCGCAAAAAAGGGAATAAGGGCGACACGGAAATGTTGAATACTCATACTC
TTCCTTTTTCAATATTATTGAAGCATTTATCAGGGTTATTGTCTCATGAG
CGGATACATATTTGAATGTATTTAGAAAAATAAACAAATAGGGGTTCCGC
GCACGAATTGGCCAGCGCTGCCATTTTTGGGGTGAGGCCGTTCGCGGCCG
AGGGGCGCAGCCCCTGGGGGGATGGGAGGCCCGCGTTAGCGGGCCGGGAG
GGTTCGAGAAGGGGGGGCACCCCCCTTCGGCGTGCGCGGTCACGCGCACA
GGGCGCAGCCCTGGTTAAAAACAAGGTTTATAAATATTGGTTTAAAAGCA
GGTTAAAAGACAGGTTAGCGGTGGCCGAAAAACGGGCGGAAACCCTTGCA
AATGCTGGATTTTCTGCCTGTGGACAGCCCCTCAAATGTCAATAGGTGCG
CCCCTCATCTGTCAGCACTCTGCCCCTCAAGTGTCAAGGATCGCGCCCCT
CATCTGTCAGTAGTCGCGCCCCTCAAGTGTCAATACCGCAGGGCACTTAT
CCCCAGGCTTGTCCACATCATCTGTGGGAAACTCGCGTAAAATCAGGCGT
TTTCGCCGATTTGCGAGGCTGGCCAGCTCCACGTCGCCGGCCGAAATCGA
GCCTGCCCCTCATCTGTCAACGCCGCGCCGGGTGAGTCGGCCCCTCAAGT
GTCAACGTCCGCCCCTCATCTGTCAGTGAGGGCCAAGTTTTCCGCGAGGT
ATCCACAACGCCGGCGGCCGCGGTGTCTCGCACACGGCTTCGACGGCGTT
TCTGGCGCGTTTGCAGGGCCATAGACGGCCGCCAGCCCAGCGGCGAGGGC
AACCAGCCCGGTGAGCGTCGCAAAGGAGATCCTGATCTGACTGATGGGCT
GCCTGTATCGAGTGGTGATTTTGTGCCGAGCTGCCGGTCGGGGAGCTGTT
GGCTGGCTGGTGGCAGGATATATTGTGGTGTAAACAAATTGACGCTTAGA
CAACTTAATAACACATTGCGGACGTTTTTAATGTACTGGGGTGGATGCAG
TGGGCCC
>pMYP_A5E
(SEQ ID NO: 41)

[chemical structure]

CCCGACTGGAAAGCGGGCAGTGAGCGCAACGCAATTAATGTGAGTTAGCT
CACTCATTAGGCACCCCAGGCTTTACACTTTATGCTTCCGGCTCGTATGT
TGTGTGGAATTGTGAGCGGATAACAATTTCACACAGGAAACAGCTATGAC
CATGATTACGCCAAGCTTGCATGCCTGCAGGTCGACTCTAGAGGATCCCC
GGGTACCGAGCTCGAATTCACTGGCCGTCGTTTTACAACGTCGTGACTGG
GAAAACCCTGGCGTTACCCAACTTAATCGCCTTGCAGCACATCCCCCTTT
CGCCAGCTGGCGTAATAGCGAAGAGGCCCGCACCGATCGCCCTTCCCAAC
AGTTGCGCAGCCTGAATGGCGAATGGCGCCTGATGCGGTATTTTCTCCTT
ACGCATCTGTGCGGTATTTCACACCGCATATGGTGCACTCTCAGTACAAT
CTGCTCTGATGCCGCATAGTTAAGCCAGCCCCGACACCCGCCAACACCCG
CTGACGCGCCCTGACGGGCTTGTCTGCTCCCGGCATCCGCTTACAGACAA

[chemical structure]

AGTGTTTGACAGGATATATTGGCGGGTAAACCTAAGAGAAAAGAGCGTTT
ATTAGAATAATCGGATATTTAAAAGGGCGTGAAAAGGTTTATCCGTTCGT
CCATTTGTATGTGCATGCCAACCACAGGGTTCCCCAGATCAGGCGCTGGC
TGCTGAACCCCCAGCCGGAACTGACCCCACAAGGCCCTAGCGTTTGCAAT
GCACCAGGTCATCATTGACCCAGGCGTGTTCCACCAGGCCGCTGCCTCGC
AACTCTTCGCAGGCTTCGCCGACCTGCTCGCGCCACTTCTTCACGCGGGT
GGAATCCGATCCGCACATGAGGCGGAAGGTTTCCAGCTTGAGCGGGTACG
GCTCCCGGTGCGAGCTGAAATAGTCGAACATCCGTCGGGCCGTCGGCGAC
AGCTTGCGGTACTTCTCCCATATGAATTTCGTGTAGTGGTCGCCAGCAAA
CAGCACGACGATTTCCTCGTCGATCAGGACCTGGCAACGGGACGTTTTCT
TGCCACGGTCCAGGACGCGGAAGCGGTGCAGCAGCGACACCGATTCCAGG
TGCCCAACGCGGTCGGACGTGAAGCCCATCGCCGTCGCCTGTAGGCGCGA
CAGGCATTCCTCGGCCTTCGTGTAATACCGGCCATTGATCGACCAGCCCA
GGTCCTGGCAAAGCTCGTAGAACGTGAAGGTGATCGGCTCGCCGATAGGG
GTGCGCTTCGCGTACTCCAACACCTGCTGCCACACCAGTTCGTCATCGTC
GGCCCGCAGCTCGACGCCGGTGTAGGTGATCTTCACGTCCTTGTTGACGT
GGAAAATGACCTTGTTTTGCAGCGCCTCGCGCGGGATTTTCTTGTTGCGC
GTGGTGAACAGGGCAGAGCGGGCCGTGTCGTTTGGCATCGCTCGCATCGT
GTCCGGCCACGGCGCAATATCGAACAAGGAAAGCTGCATTTCCTTGATCT
GCTGCTTCGTGTGTTTCAGCAACGCGGCCTGCTTGGCCTCGCTGACCTGT
TTTGCCAGGTCCTCGCCGGCGGTTTTTCGCTTCTTGGTCGTCATAGTTCC
TCGCGTGTCGATGGTCATCGACTTCGCCAAACCTGCCGCCTCCTGTTCAA
GACGACGCGAACGCTCCACGGCGGCCGATGGCGCGGGCAGGGCAGGGGGA
GCCAGTTGCACGCTGTCGCGCTCGATCTTGGCCGTAGCTTGCTGGACCAT
CGAGCCGACGGACTGGAAGGTTTCGCGGGGCGCACGCATGACGGTGCGGC
TTGCGATGGTTTCGGCATCCTCGGCGGAAAACCCCGCGTCGATCAGTTCT
TGCCTGTATGCCTTCCGGTCAAACGTCCGATTCATTCACCCTCCTTGCGG
GATTGCCCCGACTCACGCCGGGGCAATGTGCCCTTATTCCTGATTTGACC
CGCCTGGTGCCTTGGTGTCCAGATAATCCACCTTATCGGCAATGAAGTCG
GTCCCGTAGACCGTCTGGCCGTCCTTCTCGTACTTGGTATTCCGAATCTT
GCCCTGCACGAATACCAGCGACCCCTTGCCCAAATACTTGCCGTGGGCCT
CGGCCTGAGAGCCAAAACACTTGATGCGGAAGAAGTCGGTGCGCTCCTGC
TTGTCGCCGGCATCGTTGCGCCACATCTAGGATCTGCCAGGAACCGTAAA
AAGGCCGCGTTGCTGGCGTTTTTCCATAGGCTCCGCCCCCCTGACGAGCA
TCACAAAAATCGACGCTCAAGTCAGAGGTGGCGAAACCCGACAGGACTAT
AAAGATACCAGGCGTTTCCCCCTGGAAGCTCCCTCGTGCGCTCTCCTGTT
CCGACCCTGCCGCTTACCGGATACCTGTCCGCCTTTCTCCCTTCGGGAAG
CGTGGCGCTTTCTCATAGCTCACGCTGTAGGTATCTCAGTTCGGTGTAGG
TCGTTCGCTCCAAGCTGGGCTGTGTGCACGAACCCCCCGTTCAGCCCGAC
CGCTGCGCCTTATCCGGTAACTATCGTCTTGAGTCCAACCCGGTAAGACA
CGACTTATCGCCACTGGCAGCAGCCACTGGTAACAGGATTAGCAGAGCGA
GGTATGTAGGCGGTGCTACAGAGTTCTTGAAGTGGTGGCCTAACTACGGC
TACACTAGAAGGACAGTATTTGGTATCTGCGCTCTGCTGAAGCCAGTTAC
CTTCGGAAAAAGAGTTGGTAGCTCTTGATCCGGCAAACAAACCACCGCTG
GTAGCGGTGGTTTTTTTGTTTGCAAGCAGCAGATTACGCGCAGAAAAAAA
GGATCTCAAGAAGATCCTTTGATCTTTTCTACGGGGTCTGACGCTCAGTG
GAACGAAAACTCACGTTAAGGGATTTTGGTCATGAGATTATCAAAAAGGA
TCTTCACCTAGATCCTTTTAAATTAAAAATGAAGTTTTAAATCAATCTAA
AGTATATATGAGTAAACTTGGTCTGACAGTTACCAATGCTTAATCAGTGA
GGCACCTATCTCAGCGATCTGTCTATTTCGTTCATCCATAGTTGCCTGAC
TCCCCGTCGTGTAGATAACTACGATACGGGAGGGCTTACCATCTGGCCCC
AGTGCTGCAATGATACCGCGAGAACCACGCTCACCGGCTCCAGATTTATC
AGCAATAAACCAGCCAGCCGGAAGGGCCGAGCGCAGAAGTGGTCCTGCAA
CTTTATCCGCCTCCATCCAGTCTATTAATTGTTGCCGGGAAGCTAGAGTA
AGTAGTTCGCCAGTTAATAGTTTGCGCAACGTTGTTGCCATTGCTACAGG
CATCGTGGTGTCACGCTCGTCGTTTGGTATGGCTTCATTCAGCTCCGGTT
CCCAACGATCAAGGCGAGTTACATGATCCCCCATGTTGTGCAAAAAAGCG
GTTAGCTCCTTCGGTCCTCCGATCGTTGTCAGAAGTAAGTTGGCCGCAGT
GTTATCACTCATGGTTATGGCAGCACTGCATAATTCTCTTACTGTCATGC
CATCCGTAAGATGCTTTTCTGTGACTGGTGAGTACTCAACCAAGTCATTC
TGAGAATAGTGTATGCGGCGACCGAGTTGCTCTTGCCCGGCGTCAATACG
GGATAATACCGCGCCACATAGCAGAACTTTAAAAGTGCTCATCATTGGAA
AACGTTCTTCGGGGCGAAAACTCTCAAGGATCTTACCGCTGTTGAGATCC
AGTTCGATGTAACCCACTCGTGCACCCAACTGATCTTCAGCATCTTTTAC
TTTCACCAGCGTTTCTGGGTGAGCAAAAACAGGAAGGCAAAATGCCGCAA
AAAAGGGAATAAGGGCGACACGGAAATGTTGAATACTCATACTCTTCCTT
TTTCAATATTATTGAAGCATTTATCAGGGTTATTGTCTCATGAGCGGATA
CATATTTGAATGTATTTAGAAAAATAAACAAATAGGGGTTCCGCGCACGA
ATTGGCCAGCGCTGCCATTTTTGGGGTGAGGCCGTTCGCGGCCGAGGGGC
GCAGCCCCTGGGGGGATGGGAGGCCCGCGTTAGCGGGCCGGGAGGGTTCG
AGAAGGGGGGGCACCCCCCTTCGGCGTGCGCGGTCACGCGCACAGGGCGC
AGCCCTGGTTAAAAACAAGGTTTATAAATATTGGTTTAAAAGCAGGTTAA
AAGACAGGTTAGCGGTGGCCGAAAAACGGGCGGAAACCCTTGCAAATGCT
GGATTTTCTGCCTGTGGACAGCCCCTCAAATGTCAATAGGTGCGCCCCTC
ATCTGTCAGCACTCTGCCCCTCAAGTGTCAAGGATCGCGCCCCTCATCTG
TCAGTAGTCGCGCCCCTCAAGTGTCAATACCGCAGGGCACTTATCCCCAG
GCTTGTCCACATCATCTGTGGGAAACTCGCGTAAAATCAGGCGTTTTCGC
CGATTTGCGAGGCTGGCCAGCTCCACGTCGCCGGCCGAAATCGAGCCTGC
CCCTCATCTGTCAACGCCGCGCCGGGTGAGTCGGCCCCTCAAGTGTCAAC
GTCCGCCCCTCATCTGTCAGTGAGGGCCAAGTTTTCCGCGAGGTATCCAC
AACGCCGGCGGCCGCGGTGTCTCGCACACGGCTTCGACGGCGTTTCTGGC
GCGTTTGCAGGGCCATAGACGGCCGCCAGCCCAGCGGCGAGGGCAACCAG
CCCGGTGAGCGTCGCAAAGGAGATCCTGATCTGACTGATGGGCTGCCTGT
ATCGAGTGGTGATTTTGTGCCGAGCTGCCGGTCGGGGAGCTGTTGGCTGG
CTGGTGGCAGGATATATTGTGGTGTAAACAAATTGACGCTTAGACAACTT
AATAACACATTGCGGACGTTTTTAATGTACTGGGGTGGATGCAGTGGGCC
C
>pMZP_P6T
(SEQ ID NO: 42)

[chemical structure]

TTCCCGACTGGAAAGCGGGCAGTGAGCGCAACGCAATTAATGTGAGTTAG
CTCACTCATTAGGCACCCCAGGCTTTACACTTTATGCTTCCGGCTCGTAT
GTTGTGTGGAATTGTGAGCGGATAACAATTTCACACAGGAAACAGCTATG
ACCATGATTACGCCAAGCTTGCATGCCTGCAGGTCGACTCTAGAGGATCC
CCGGGTACCGAGCTCGAATTCACTGGCCGTCGTTTTACAACGTCGTGACT
GGGAAAACCCTGGCGTTACCCAACTTAATCGCCTTGCAGCACATCCCCCT
TTCGCCAGCTGGCGTAATAGCGAAGAGGCCCGCACCGATCGCCCTTCCCA
ACAGTTGCGCAGCCTGAATGGCGAATGGCGCCTGATGCGGTATTTTCTCC
TTACGCATCTGTGCGGTATTTCACACCGCATATGGTGCACTCTCAGTACA
ATCTGCTCTGATGCCGCATAGTTAAGCCAGCCCCGACACCCGCCAACACC
CGCTGACGCGCCCTGACGGGCTTGTCTGCTCCCGGCATCCGCTTACAGAC

[chemical structure]

TATCAGTGTTTGACAGGATATATTGGCGGGTAAACCTAAGAGAAAAGAGC
GTTTATTAGAATAATCGGATATTTAAAAGGGCGTGAAAAGGTTTATCCGT
TCGTCCATTTGTATGTGCATGCCAACCACAGGGTTCCCCAGATCAGGCGC
TGGCTGCTGAACCCCCAGCCGGAACTGACCCCACAAGGCCCTAGCGTTTG
CAATGCACCAGGTCATCATTGACCCAGGCGTGTTCCACCAGGCCGCTGCC
TCGCAACTCTTCGCAGGCTTCGCCGACCTGCTCGCGCCACTTCTTCACGC
GGGTGGAATCCGATCCGCACATGAGGCGGAAGGTTTCCAGCTTGAGCGGG
TACGGCTCCCGGTGCGAGCTGAAATAGTCGAACATCCGTCGGGCCGTCGG
CGACAGCTTGCGGTACTTCTCCCATATGAATTTCGTGTAGTGGTCGCCAG
CAAACAGCACGACGATTTCCTCGTCGATCAGGACCTGGCAACGGGACGTT
TTCTTGCCACGGTCCAGGACGCGGAAGCGGTGCAGCAGCGACACCGATTC
CAGGTGCCCAACGCGGTCGGACGTGAAGCCCATCGCCGTCGCCTGTAGGC
GCGACAGGCATTCCTCGGCCTTCGTGTAATACCGGCCATTGATCGACCAG
CCCAGGTCCTGGCAAAGCTCGTAGAACGTGAAGGTGATCGGCTCGCCGAT
AGGGGTGCGCTTCGCGTACTCCAACACCTGCTGCCACACCAGTTCGTCAT
CGTCGGCCCGCAGCTCGACGCCGGTGTAGGTGATCTTCACGTCCTTGTTG
ACGTGGAAAATGACCTTGTTTTGCAGCGCCTCGCGCGGGATTTTCTTGTT
GCGCGTGGTGAACAGGGCAGAGCGGGCCGTGTCGTTTGGCATCGCTCGCA
TCGTGTCCGGCCACGGCGCAATATCGAACAAGGAAAGCTGCATTTCCTTG
ATCTGCTGCTTCGTGTGTTTCAGCAACGCGGCCTGCTTGGCCTCGCTGAC
CTGTTTTGCCAGGTCCTCGCCGGCGGTTTTTCGCTTCTTGGTCGTCATAG
TTCCTCGCGTGTCGATGGTCATCGACTTCGCCAAACCTGCCGCCTCCTGT
TCAAGACGACGCGAACGCTCCACGGCGGCCGATGGCGCGGGCAGGGCAGG
GGGAGCCAGTTGCACGCTGTCGCGCTCGATCTTGGCCGTAGCTTGCTGGA
CCATCGAGCCGACGGACTGGAAGGTTTCGCGGGGCGCACGCATGACGGTG
CGGCTTGCGATGGTTTCGGCATCCTCGGCGGAAAACCCCGCGTCGATCAG
TTCTTGCCTGTATGCCTTCCGGTCAAACGTCCGATTCATTCACCCTCCTT
GCGGGATTGCCCCGACTCACGCCGGGGCAATGTGCCCTTATTCCTGATTT
GACCCGCCTGGTGCCTTGGTGTCCAGATAATCCACCTTATCGGCAATGAA
GTCGGTCCCGTAGACCGTCTGGCCGTCCTTCTCGTACTTGGTATTCCGAA
TCTTGCCCTGCACGAATACCAGCGACCCCTTGCCCAAATACTTGCCGTGG
GCCTCGGCCTGAGAGCCAAAACACTTGATGCGGAAGAAGTCGGTGCGCTC
CTGCTTGTCGCCGGCATCGTTGCGCCACATCTAGGATCTGCCAGGAACCG
TAAAAAGGCCGCGTTGCTGGCGTTTTTCCATAGGCTCCGCCCCCCTGACG
AGCATCACAAAAATCGACGCTCAAGTCAGAGGTGGCGAAACCCGACAGGA
CTATAAAGATACCAGGCGTTTCCCCCTGGAAGCTCCCTCGTGCGCTCTCC
TGTTCCGACCCTGCCGCTTACCGGATACCTGTCCGCCTTTCTCCCTTCGG
GAAGCGTGGCGCTTTCTCATAGCTCACGCTGTAGGTATCTCAGTTCGGTG
TAGGTCGTTCGCTCCAAGCTGGGCTGTGTGCACGAACCCCCCGTTCAGCC
CGACCGCTGCGCCTTATCCGGTAACTATCGTCTTGAGTCCAACCCGGTAA
GACACGACTTATCGCCACTGGCAGCAGCCACTGGTAACAGGATTAGCAGA
GCGAGGTATGTAGGCGGTGCTACAGAGTTCTTGAAGTGGTGGCCTAACTA
CGGCTACACTAGAAGGACAGTATTTGGTATCTGCGCTCTGCTGAAGCCAG
TTACCTTCGGAAAAAGAGTTGGTAGCTCTTGATCCGGCAAACAAACCACC
GCTGGTAGCGGTGGTTTTTTTGTTTGCAAGCAGCAGATTACGCGCAGAAA
AAAAGGATCTCAAGAAGATCCTTTGATCTTTTCTACGGGGTCTGACGCTC
AGTGGAACGAAAACTCACGTTAAGGGATTTTGGTCATGAGATTATCAAAA
AGGATCTTCACCTAGATCCTTTTAAATTAAAAATGAAGTTTTAAATCAAT
CTAAAGTATATATGAGTAAACTTGGTCTGACAGTTACCAATGCTTAATCA
GTGAGGCACCTATCTCAGCGATCTGTCTATTTCGTTCATCCATAGTTGCC
TGACTCCCCGTCGTGTAGATAACTACGATACGGGAGGGCTTACCATCTGG
CCCCAGTGCTGCAATGATACCGCGAGAACCACGCTCACCGGCTCCAGATT
TATCAGCAATAAACCAGCCAGCCGGAAGGGCCGAGCGCAGAAGTGGTCCT
GCAACTTTATCCGCCTCCATCCAGTCTATTAATTGTTGCCGGGAAGCTAG
AGTAAGTAGTTCGCCAGTTAATAGTTTGCGCAACGTTGTTGCCATTGCTA
CAGGCATCGTGGTGTCACGCTCGTCGTTTGGTATGGCTTCATTCAGCTCC
GGTTCCCAACGATCAAGGCGAGTTACATGATCCCCCATGTTGTGCAAAAA
AGCGGTTAGCTCCTTCGGTCCTCCGATCGTTGTCAGAAGTAAGTTGGCCG
CAGTGTTATCACTCATGGTTATGGCAGCACTGCATAATTCTCTTACTGTC
ATGCCATCCGTAAGATGCTTTTCTGTGACTGGTGAGTACTCAACCAAGTC
ATTCTGAGAATAGTGTATGCGGCGACCGAGTTGCTCTTGCCCGGCGTCAA
TACGGGATAATACCGCGCCACATAGCAGAACTTTAAAAGTGCTCATCATT
GGAAAACGTTCTTCGGGGCGAAAACTCTCAAGGATCTTACCGCTGTTGAG
ATCCAGTTCGATGTAACCCACTCGTGCACCCAACTGATCTTCAGCATCTT
TTACTTTCACCAGCGTTTCTGGGTGAGCAAAAACAGGAAGGCAAAATGCC
GCAAAAAAGGGAATAAGGGCGACACGGAAATGTTGAATACTCATACTCTT
CCTTTTTCAATATTATTGAAGCATTTATCAGGGTTATTGTCTCATGAGCG
GATACATATTTGAATGTATTTAGAAAAATAAACAAATAGGGGTTCCGCGC
ACGAATTGGCCAGCGCTGCCATTTTTGGGGTGAGGCCGTTCGCGGCCGAG
GGGCGCAGCCCCTGGGGGGATGGGAGGCCCGCGTTAGCGGGCCGGGAGGG
TTCGAGAAGGGGGGGCACCCCCCTTCGGCGTGCGCGGTCACGCGCACAGG
GCGCAGCCCTGGTTAAAAACAAGGTTTATAAATATTGGTTTAAAAGCAGG
TTAAAAGACAGGTTAGCGGTGGCCGAAAAACGGGCGGAAACCCTTGCAAA
TGCTGGATTTTCTGCCTGTGGACAGCCCCTCAAATGTCAATAGGTGCGCC
CCTCATCTGTCAGCACTCTGCCCCTCAAGTGTCAAGGATCGCGCCCCTCA
TCTGTCAGTAGTCGCGCCCCTCAAGTGTCAATACCGCAGGGCACTTATCC
CCAGGCTTGTCCACATCATCTGTGGGAAACTCGCGTAAAATCAGGCGTTT
TCGCCGATTTGCGAGGCTGGCCAGCTCCACGTCGCCGGCCGAAATCGAGC
CTGCCCCTCATCTGTCAACGCCGCGCCGGGTGAGTCGGCCCCTCAAGTGT
CAACGTCCGCCCCTCATCTGTCAGTGAGGGCCAAGTTTTCCGCGAGGTAT
CCACAACGCCGGCGGCCGCGGTGTCTCGCACACGGCTTCGACGGCGTTTC
TGGCGCGTTTGCAGGGCCATAGACGGCCGCCAGCCCAGCGGCGAGGGCAA
CCAGCCCGGTGAGCGTCGCAAAGGAGATCCTGATCTGACTGATGGGCTGC
CTGTATCGAGTGGTGATTTTGTGCCGAGCTGCCGGTCGGGGAGCTGTTGG
CTGGCTGGTGGCAGGATATATTGTGGTGTAAACAAATTGACGCTTAGACA
ACTTAATAACACATTGCGGACGTTTTTAATGTACTGGGGTGGATGCAGTG
GGCCC
>pMXBG_A7I
(SEQ ID NO: 43)

[chemical structure]

CATATATACTTTAGATTGATTTAAAACTTCATTTTTAATTTAAAAGGATC
TAGGTGAAGATCCTTTTTGATAATCTCATGACCAAAATCCCTTAACGTGA
GTTTTCGTTCCACTGAGCGTCAGACCCCGTAGAAAAGATCAAAGGATCTT
CTTGAGATCCTTTTTTTCTGCGCGTAATCTGCTGCTTGCAAACAAAAAAA
CCACCGCTACCAGCGGTGGTTTGTTTGCCGGATCAAGAGCTACCAACTCT
TTTTCCGAAGGTAACTGGCTTCAGCAGAGCGCAGATACCAAATACTGTCC
TTCTAGTGTAGCCGTAGTTAGGCCACCACTTCAAGAACTCTGTAGCACCG
CCTACATACCTCGCTCTGCTAATCCTGTTACCAGTGGCTGCTGCCAGTGG
CGATAAGTCGTGTCTTACCGGGTTGGACTCAAGACGATAGTTACCGGATA
AGGCGCAGCGGTCGGGCTGAACGGGGGGTTCGTGCACACAGCCCAGCTTG
GAGCGAACGACCTACACCGAACTGAGATACCTACAGCGTGAGCTATGAGA
AAGCGCCACGCTTCCCGAAGGGAGAAAGGCGGACAGGTATCCGGTAAGCG
GCAGGGTCGGAACAGGAGAGCGCACGAGGGAGCTTCCAGGGGGAAACGCC
TGGTATCTTTATAGTCCTGTCGGGTTTCGCCACCTCTGACTTGAGCGTCG
ATTTTTGTGATGCTCGTCAGGGGGGCGGAGCCTATGGAAAAACGCCAGCA
ACGCGGCCTTTTTACGGTTCCTGGCCTTTTGCTGGCCTTTTGCTCACATG
TTCTTTCCTGCGTTATCCCCTGATTCTGTGGATAACCGTATTACCGCCTT
TGAGTGAGCTGATACCGCTCGCCGCAGCCGAACGACCGAGCGCAGCGAGT
CAGTGAGCGAGGAAGCGGATGAGCGCCCAATACGCAAACCGCCTCTCCCC
GCGCGTTGGCCGATTCATTAATGCAGCTGGCACGACAGGTTTCCCGACTG
GAAAGCGGGCAGTGAGCGCAACGCAATTAATGTGAGTTAGCTCACTCATT
AGGCACCCCAGGCTTTACACTTTATGCTTCCGGCTCGTATGTTGTGTGGA
ATTGTGAGCGGATAACAATTTCACACAGGAAACAGCTATGACCATGATTA
CGCCAAGCTTGCATGCCTGCAGGTCGACTCTAGAGGATCCCCGGGTACCG
AGCTCGAATTCACTGGCCGTCGTTTTACAACGTCGTGACTGGGAAAACCC
TGGCGTTACCCAACTTAATCGCCTTGCAGCACATCCCCCTTTCGCCAGCT
GGCGTAATAGCGAAGAGGCCCGCACCGATCGCCCTTCCCAACAGTTGCGC
AGCCTGAATGGCGAATGGCGCCTGATGCGGTATTTTCTCCTTACGCATCT
GTGCGGTATTTCACACCGCATATGGTGCACTCTCAGTACAATCTGCTCTG
ATGCCGCATAGTTAAGCCAGCCCCGACACCCGCCAACACCCGCTGACGCG
CCCTGACGGGCTTGTCTGCTCCCGGCATCCGCTTACAGACAAGCTGTGAC

[chemical structure]

GCCGCACGAATCCATGTGGGAGTTTATTCTTGACACAGATATTTATGATA
TAATAACTGAGTAAGCTTAACATAAGGAGGAAAAACATATGTTACGCAGC
AGCAACGATGTTACGCAGCAGGGCAGTCGCCCTAAAACAAAGTTAGGTGG
CTCAAGTATGGGCATCATTCGCACATGTAGGCTCGGCCCTGACCAAGTCA
AATCCATGCGGGCTGCTCTTGATCTTTTCGGTCGTGAGTTCGGAGACGTA
GCCACCTACTCCCAACATCAGCCGGACTCCGATTACCTCGGGAACTTGCT
CCGTAGTAAGACATTCATCGCGCTTGCTGCCTTCGACCAAGAAGCGGTTG
TTGGCGCTCTCGCGGCTTACGTTCTGCCCAAGTTTGAGCAGCCGCGTAGT
GAGATCTATATCTATGATCTCGCAGTCTCCGGCGAGCACCGGAGGCAGGG
CATTGCCACCGCGCTCATCAATCTCCTCAAGCATGAGGCCAACGCGCTTG
GTGCTTATGTGATCTACGTGCAAGCAGATTACGGTGACGATCCCGCAGTG
GCTCTCTATACAAAGTTGGGCATACGGGAAGAAGTGATGCACTTTGATAT
CGACCCAAGTACCGCCACCTAAGAGCTGGAGCGGCGTAACCGTCGCACAG
GAAGGACAGAGAAAGCGCGGATCTGGGAAGTGACGGACAGAACGGTCAGG
ACCTGGATTGGGGAGGCGGTTGCCGCCGCTGCTGCTGACGGTGTGACGTT
CTCTGTTCCGGTCACACCACATACGTTCCGCCATTCCTATGCGATGCACA
TGCTGTATGCCGGTATACCGCTGAAAGTTCTGCAAAGCCTGATGGGACAT
AAGTCCATCAGTTCAACGGAAGTCTACACGAAGGTTTTTGCGCTGGATGT
GGCTGCCCGGCTCCGGGTGCAGTTTGCGATGCCGGAGTCTGATGCGGTTG
CGATGCTGAAACAATTATCCTGAGAATAAATGCCTTGGCCTTTATATGGA
AATGTGGAACTGAGTGGATATGCTGTTTTTGTCTGTTAAACAGAGAAGCT
GGCTGTTATCCACTGAGAAGCGAACGAAACAGTCGGGAAAATCTCCCATT
ATCGTAGAGATCCGCATTATTAATCTCAGGAGCCTGTGTAGCGTTTATAG
GAAGTAGTGTTCTGTCATGATGCCTGCAAGCGGTAACGAAAACGATTTGA
ATATGCCTTCAGGAACAATAGAAATCTTCGTGCGGTGTTACGTTGAAGTG
GAGCGGATTATGTCAGCAATGGACAGAACAACCTAATGAACACAGAACCA
TGATGTGGTCTGTCCTTTTACAGCCAGTAGTGCTCGCCGCAGTCGAGCGA
CAGGGCGAAGCCCTCGAGTGAGCGAGGAAGCACCAGGGAACAGCACTTAT
ATATTCTGCTTACACACGATGCCTGAAAAAACTTCCCTTGGGGTTATCCA
CTTATCCACGGGGATATTTTTATAATTATTTTTTTTATAGTTTTTAGATC
TTCTTTTTTAGAGCGCCTTGTAGGCCTTTATCCATGCTGGTTCTAGAGAA
GGTGTTGTGACAAATTGCCCTTTCAGTGTGACAAATCACCCTCAAATGAC
AGTCCTGTCTGTGACAAATTGCCCTTAACCCTGTGACAAATTGCCCTCAG
AAGAAGCTGTTTTTTCACAAAGTTATCCCTGCTTATTGACTCTTTTTTAT
TTAGTGTGACAATCTAAAAACTTGTCACACTTCACATGGATCTGTCATGG
CGGAAACAGCGGTTATCAATCACAAGAAACGTAAAAATAGCCCGCGAATC
GTCCAGTCAAACGACCTCACTGAGGCGGCATATAGTCTCTCCCGGGATCA
AAAACGTATGCTGTATCTGTTCGTTGACCAGATCAGAAAATCTGATGGCA
CCCTACAGGAACATGACGGTATCTGCGAGATCCATGTTGCTAAATATGCT
GAAATATTCGGATTGACCTCTGCGGAAGCCAGTAAGGATATACGGCAGGC
ATTGAAGAGTTTCGCGGGGAAGGAAGTGGTTTTTTATCGCCCTGAAGAGG
ATGCCGGCGATGAAAAAGGCTATGAATCTTTTCCTTGGTTTATCAAACGT
GCGCACAGTCCATCCAGAGGGCTTTACAGTGTACATATCAACCCATATCT
CATTCCCTTCTTTATCGGGTTACAGAACCGGTTTACGCAGTTTCGGCTTA
GTGAAACAAAAGAAATCACCAATCCGTATGCCATGCGTTTATACGAATCC
CTGTGTCAGTATCGTAAGCCGGATGGCTCAGGCATCGTGTCTCTGAAAAT
CGACTGGATCATAGAGCGTTACCAGCTGCCTCAAAGTTACCAGCGTATGC
CTGACTTCCGCCGCCGCTTCCTGCAGGTCTGTGTTAATGAGATCAACAGC
AGAACTCCAATGCGCCTCTCATACATTGAGAAAAAGAAAGGCCGCCAGAC
GACTCATATCGTATTTTCCTTCCGCGATATCACTTCCATGACGACAGGAT
AGTCTGAGGGTTATCTGTCACAGATTTGAGGGTGGTTCGTCACATTTGTT
CTGACCTACTGAGGGTAATTTGTCACAGTTTTGCTGTTTCCTTCAGCCTG
CATGGATTTTCTCATACTTTTTGAACTGTAATTTTTAAGGAAGCCAAATT
TGAGGGCAGTTTGTCACAGTTGATTTCCTTCTCTTTCCCTTCGTCATGTG
ACCTGATATCGGGGGTTAGTTCGTCATCATTGATGAGGGTTGATTATCAC
AGTTTATTACTCTGAATTGGCTATCCGCGTGTGTACCTCTACCTGGAGTT
TTTCCCACGGTGGATATTTCTTCTTGCGCTGAGCGTAAGAGCTATCTGAC
AGAACAGTTCTTCTTTGCTTCCTCGCCAGTTCGCTCGCTATGCTCGGTTA
CACGGCTGCGGCGAGCGCTAGTGATAATAAGTGACTGAGGTATGTGGTGT
TCTTATCTCCTTTTGTAGTGTTGCTCTTATTTTAAACAACTTTGCGGTTT
TTTGATGACTTTGCGATTTTGTTGTTGCTTTGCAGTAAATTGCAAGATTT
AATAAAAAAACGCAAAGCAATGATTAAAGGATGTTCAGAATGAAACTCAT
GGAAACACTTAACCAGTGCATAAACGCTGGTCATGAAATGACGAAGGCTA
TCGCCATTGCACAGTTTAATGATGACAGCCCGGAAGCGAGGAAAATAACC
CGGCGCTGGAGAATAGGTGAAGCAGCGGATTTAGTTGGGGTTTCTTCTCA
GGCTATCAGAGATGCCGAGAAAGCAGGGCGACTACCGCACCCGGATATGG
AAATTCGAGGACGGGTTGAGCAACGTGTTGGTTATACAATTGAACAAATT
AATCATATGCGTGATGTGTTTGGTACGCGATTGCGACGTGCTGAGGACGT
ATTTCCACCGGTGATCGGGGTTGCTGCCCATAAAGGTGGCGTTTACAAAA
CCTCAGTTTCTGTTCATCTTGCTCAGGATCTGGCTCTGAAGGGGCTACGT
GTTTTGCTCGTGGAAGGTAACGACCCCCAGGGAACAGCCTCAATGTATCA
CGGATGGGTACCAGATCTTCATATTCATGCAGAAGATACTCTCCTGCCTT
TCTATCTTGGGGAAAAGGACGATGTCACTTATGCAATAAAGCCCACTTGC
TGGCCGGGGCTTGACATTATTCCTTCCTGTCTGGCTCTGCACCGTATTGA
AACTGAGTTAATGGGCAAATTTGATGAAGGTAAACTGCCCACCGATCCAC
ACCTGATGCTCCGACTGGCCATTGAAACTGTTGCTCATGACTATGATGTC
ATAGTTATTGACAGCGCGCCTAACCTGGGTATCGGCACGATTAATGTCGT
ATGTGCTGCTGATGTGCTGATTGTTCCCACGCCTGCTGAGTIGTTTGACT
ACACCTCCGCACTGCAGTTTTTCGATATGCTTCGTGATCTGCTCAAGAAC
GTTGATCTTAAAGGGTTCGAGCCTGATGTACGTATTTTGCTTACCAAATA
CAGCAATAGTAATGGCTCTCAGTCCCCGTGGATGGAGGAGCAAATTCGGG
ATGCCTGGGGAAGCATGGTTCTAAAAAATGTTGTACGTGAAACGGATGAA
GTTGGTAAAGGTCAGATCCGGATGAGAACTGTTTTTGAACAGGCCATTGA
TCAACGCAGTTCAACTGGTGCCTGGAGAAATGCTCTTTCTATTTGGGAAC
CTGTCTGCAATGAAATTTTCGATCGTCTGATTAAACCACGCTGGGAGATT
AGATAATGAAGCGTGCGCCTGTTATTCCAAAACATACGCTCAATACTCAA
CCGGTTGAAGATACTTCGTTATCGACACCAGCTGCCCCGATGGTGGATTC
GTTAATTGCGCGCGTAGGAGTAATGGCTCGCGGTAATGCCATTACTTTGC
CTGTATGTGGTCGGGATGTGAAGTTTACTCTTGAAGTGCTCCGGGGTGAT
AGTGTTGAGAAAACCTCTCGGGTATGGTCAGGTAATGAACGTGACCAGGA
GCTGCTTACTGAGGACGCACTGGATGATCTCATCCCTTCTTTTCTACTGA
CTGGTCAACAGACACCGGCGTTCGGTCGAAGAGTATCTGGTGTCATAGAA
ATTGCCGATGGGAGTCGCCGTCGTAAAGCTGCTGCACTTACCGAAAGTGA
TTATCGTGTTCTGGTTGGCGAGCTGGATGATGAGCAGATGGCTGCATTAT
CCAGATTGGGTAACGATTATCGCCCAACAAGTGCTTATGAACGTGGTCAG
CGTTATGCAAGCCGATTGCAGAATGAATTTGCTGGAAATATTTCTGCGCT
GGCTGATGCGGAAAATATTTCACGTAAGATTATTACCCGCTGTATCAACA
CCGCCAAATTGCCTAAATCAGTTGTTGCTCTTTTTTCTCACCCCGGTGAA
CTATCTGCCCGGTCAGGTGATGCACTTCAAAAAGCCTTTACAGATAAAGA
GGAATTACTTAAGCAGCAGGCATCTAACCTTCATGAGCAGAAAAAAGCTG
GGGTGATATTTGAAGCTGAAGAAGTTATCACTCTTTTAACTTCTGTGCTT
AAAACGTCATCTGCATCAAGAACTAGTTTAAGCTCACGACATCAGTTTGC
TCCTGGAGCGACAGTATTGTATAAGGGCGATAAAATGGTGCTTAACCTGG
ACAGGTCACGTGTTCCAACTGAGTGTATAGAGAAAATTGAGGCCATTCTT
AAGGAACTTGAAAAGCCAGCACCCTGATGCGACCACGTTTTAGTCTACGT
TTATCTGTCTTTACTTAATGTCCTTTGTTACAGGCCAGAAAGCATAACTG
GCCTGAATATTCTCTCTGGGCCCACTGTTCCACTTGTATCGTCGGTCTGA
TAATCAGACTGGGACCACGGTCCCACTCGTATCGTCGGTCTGATTATTAG
TCTGGGACCACGGTCCCACTCGTATCGTCGGTCTGATTATTAGTCTGGGA
CCACGGTCCCACTCGTATCGTCGGTCTGATAATCAGACTGGGACCACGGT
CCCACTCGTATCGTCGGTCTGATTATTAGTCTGGGACCATGGTCCCACTC
GTATCGTCGGTCTGATTATTAGTCTGGGACCACGGTCCCACTCGTATCGT
CGGTCTGATTATTAGTCTGGAACCACGGTCCCACTCGTATCGTCGGTCTG
ATTATTAGTCTGGGACCACGGTCCCACTCGTATCGTCGGTCTGATTATTA
GTCTGGGACCACGATCCCACTCGTGTTGTCGGTCTGATTATCGGTCTGGG
ACCACGGTCCCACTTGTATTGTCGATCAGACTATCAGCGTGAGACTACGA
TTCCATCAATGCCTGTCAAGGGCAAGTATTGACATGTCGTCGTAACCTGT
AGAACGGAGTAACCTCGGTGTGCGGTTGTATGCCTGCTGTGGATTGCTGC
TGTGTCCTGCTTATCCACAACATTTTGCGCACGGTTATGTGGACAAAATA
CCTGGTTACCCAGGCCGTGCCGGCACGTTAACCGGGCTGCATCCGATGCA
AGTGTGTCGCTGTCGACGCAAGCGGCCGCA
>pMXBG_I7G
(SEQ ID NO: 44)

[chemical structure]

CATATATACTTTAGATTGATTTAAAACTTCATTTTTAATTTAAAAGGATC
TAGGTGAAGATCCTTTTTGATAATCTCATGACCAAAATCCCTTAACGTGA
GTTTTCGTTCCACTGAGCGTCAGACCCCGTAGAAAAGATCAAAGGATCTT
CTTGAGATCCTTTTTTTCTGCGCGTAATCTGCTGCTTGCAAACAAAAAAA
CCACCGCTACCAGCGGTGGTTTGTTTGCCGGATCAAGAGCTACCAACTCT
TTTTCCGAAGGTAACTGGCTTCAGCAGAGCGCAGATACCAAATACTGTCC
TTCTAGTGTAGCCGTAGTTAGGCCACCACTTCAAGAACTCTGTAGCACCG
CCTACATACCTCGCTCTGCTAATCCTGTTACCAGTGGCTGCTGCCAGTGG
CGATAAGTCGTGTCTTACCGGGTTGGACTCAAGACGATAGTTACCGGATA
AGGCGCAGCGGTCGGGCTGAACGGGGGGTTCGTGCACACAGCCCAGCTTG
GAGCGAACGACCTACACCGAACTGAGATACCTACAGCGTGAGCTATGAGA
AAGCGCCACGCTTCCCGAAGGGAGAAAGGCGGACAGGTATCCGGTAAGCG
GCAGGGTCGGAACAGGAGAGCGCACGAGGGAGCTTCCAGGGGGAAACGCC
TGGTATCTTTATAGTCCTGTCGGGTTTCGCCACCTCTGACTTGAGCGTCG
ATTTTTGTGATGCTCGTCAGGGGGGCGGAGCCTATGGAAAAACGCCAGCA
ACGCGGCCTTTTTACGGTTCCTGGCCTTTTGCTGGCCTTTTGCTCACATG
TTCTTTCCTGCGTTATCCCCTGATTCTGTGGATAACCGTATTACCGCCTT
TGAGTGAGCTGATACCGCTCGCCGCAGCCGAACGACCGAGCGCAGCGAGT
CAGTGAGCGAGGAAGCGGATGAGCGCCCAATACGCAAACCGCCTCTCCCC
GCGCGTTGGCCGATTCATTAATGCAGCTGGCACGACAGGTTTCCCGACTG
GAAAGCGGGCAGTGAGCGCAACGCAATTAATGTGAGTTAGCTCACTCATT
AGGCACCCCAGGCTTTACACTTTATGCTTCCGGCTCGTATGTTGTGTGGA
ATTGTGAGCGGATAACAATTTCACACAGGAAACAGCTATGACCATGATTA
CGCCAAGCTTGCATGCCTGCAGGTCGACTCTAGAGGATCCCCGGGTACCG
AGCTCGAATTCACTGGCCGTCGTTTTACAACGTCGTGACTGGGAAAACCC
TGGCGTTACCCAACTTAATCGCCTTGCAGCACATCCCCCTTTCGCCAGCT
GGCGTAATAGCGAAGAGGCCCGCACCGATCGCCCTTCCCAACAGTTGCGC
AGCCTGAATGGCGAATGGCGCCTGATGCGGTATTTTCTCCTTACGCATCT
GTGCGGTATTTCACACCGCATATGGTGCACTCTCAGTACAATCTGCTCTG
ATGCCGCATAGTTAAGCCAGCCCCGACACCCGCCAACACCCGCTGACGCG
CCCTGACGGGCTTGTCTGCTCCCGGCATCCGCTTACAGACAAGCTGTGAC

[chemical structure]

GCCGCACGAATCCATGTGGGAGTTTATTCTTGACACAGATATTTATGATA
TAATAACTGAGTAAGCTTAACATAAGGAGGAAAAACATATGTTACGCAGC
AGCAACGATGTTACGCAGCAGGGCAGTCGCCCTAAAACAAAGTTAGGTGG
CTCAAGTATGGGCATCATTCGCACATGTAGGCTCGGCCCTGACCAAGTCA
AATCCATGCGGGCTGCTCTTGATCTTTTCGGTCGTGAGTTCGGAGACGTA
GCCACCTACTCCCAACATCAGCCGGACTCCGATTACCTCGGGAACTTGCT
CCGTAGTAAGACATTCATCGCGCTTGCTGCCTTCGACCAAGAAGCGGTTG
TTGGCGCTCTCGCGGCTTACGTTCTGCCCAAGTTTGAGCAGCCGCGTAGT
GAGATCTATATCTATGATCTCGCAGTCTCCGGCGAGCACCGGAGGCAGGG
CATTGCCACCGCGCTCATCAATCTCCTCAAGCATGAGGCCAACGCGCTTG
GTGCTTATGTGATCTACGTGCAAGCAGATTACGGTGACGATCCCGCAGTG
GCTCTCTATACAAAGTTGGGCATACGGGAAGAAGTGATGCACTTTGATAT
CGACCCAAGTACCGCCACCTAAGAGCTGGAGCGGCGTAACCGTCGCACAG
GAAGGACAGAGAAAGCGCGGATCTGGGAAGTGACGGACAGAACGGTCAGG
ACCTGGATTGGGGAGGCGGTTGCCGCCGCTGCTGCTGACGGTGTGACGTT
CTCTGTTCCGGTCACACCACATACGTTCCGCCATTCCTATGCGATGCACA
TGCTGTATGCCGGTATACCGCTGAAAGTTCTGCAAAGCCTGATGGGACAT
AAGTCCATCAGTTCAACGGAAGTCTACACGAAGGTTTTTGCGCTGGATGT
GGCTGCCCGGCTCCGGGTGCAGTTTGCGATGCCGGAGTCTGATGCGGTTG
CGATGCTGAAACAATTATCCTGAGAATAAATGCCTTGGCCTTTATATGGA
AATGTGGAACTGAGTGGATATGCTGTTTTTGTCTGTTAAACAGAGAAGCT
GGCTGTTATCCACTGAGAAGCGAACGAAACAGTCGGGAAAATCTCCCATT
ATCGTAGAGATCCGCATTATTAATCTCAGGAGCCTGTGTAGCGTTTATAG
GAAGTAGTGTTCTGTCATGATGCCTGCAAGCGGTAACGAAAACGATTTGA
ATATGCCTTCAGGAACAATAGAAATCTTCGTGCGGTGTTACGTTGAAGTG
GAGCGGATTATGTCAGCAATGGACAGAACAACCTAATGAACACAGAACCA
TGATGTGGTCTGTCCTTTTACAGCCAGTAGTGCTCGCCGCAGTCGAGCGA
CAGGGCGAAGCCCTCGAGTGAGCGAGGAAGCACCAGGGAACAGCACTTAT
ATATTCTGCTTACACACGATGCCTGAAAAAACTTCCCTTGGGGTTATCCA
CTTATCCACGGGGATATTTTTATAATTATTTTTTTTATAGTTTTTAGATC
TTCTTTTTTAGAGCGCCTTGTAGGCCTTTATCCATGCTGGTTCTAGAGAA
GGTGTTGTGACAAATTGCCCTTTCAGTGTGACAAATCACCCTCAAATGAC
AGTCCTGTCTGTGACAAATTGCCCTTAACCCTGTGACAAATTGCCCTCAG
AAGAAGCTGTTTTTTCACAAAGTTATCCCTGCTTATTGACTCTTTTTTAT
TTAGTGTGACAATCTAAAAACTTGTCACACTTCACATGGATCTGTCATGG
CGGAAACAGCGGTTATCAATCACAAGAAACGTAAAAATAGCCCGCGAATC
GTCCAGTCAAACGACCTCACTGAGGCGGCATATAGTCTCTCCCGGGATCA
AAAACGTATGCTGTATCTGTTCGTTGACCAGATCAGAAAATCTGATGGCA
CCCTACAGGAACATGACGGTATCTGCGAGATCCATGTTGCTAAATATGCT
GAAATATTCGGATTGACCTCTGCGGAAGCCAGTAAGGATATACGGCAGGC
ATTGAAGAGTTTCGCGGGGAAGGAAGTGGTTTTTTATCGCCCTGAAGAGG
ATGCCGGCGATGAAAAAGGCTATGAATCTTTTCCTTGGTTTATCAAACGT
GCGCACAGTCCATCCAGAGGGCTTTACAGTGTACATATCAACCCATATCT
CATTCCCTTCTTTATCGGGTTACAGAACCGGTTTACGCAGTTTCGGCTTA
GTGAAACAAAAGAAATCACCAATCCGTATGCCATGCGTTTATACGAATCC
CTGTGTCAGTATCGTAAGCCGGATGGCTCAGGCATCGTGTCTCTGAAAAT
CGACTGGATCATAGAGCGTTACCAGCTGCCTCAAAGTTACCAGCGTATGC
CTGACTTCCGCCGCCGCTTCCTGCAGGTCTGTGTTAATGAGATCAACAGC
AGAACTCCAATGCGCCTCTCATACATTGAGAAAAAGAAAGGCCGCCAGAC
GACTCATATCGTATTTTCCTTCCGCGATATCACTTCCATGACGACAGGAT
AGTCTGAGGGTTATCTGTCACAGATTTGAGGGTGGTTCGTCACATTTGTT
CTGACCTACTGAGGGTAATTTGTCACAGTTTTGCTGTTTCCTTCAGCCTG
CATGGATTTTCTCATACTTTTTGAACTGTAATTTTTAAGGAAGCCAAATT
TGAGGGCAGTTTGTCACAGTTGATTTCCTTCTCTTTCCCTTCGTCATGTG
ACCTGATATCGGGGGTTAGTTCGTCATCATTGATGAGGGTTGATTATCAC
AGTTTATTACTCTGAATTGGCTATCCGCGTGTGTACCTCTACCTGGAGTT
TTTCCCACGGTGGATATTTCTTCTTGCGCTGAGCGTAAGAGCTATCTGAC
AGAACAGTTCTTCTTTGCTTCCTCGCCAGTTCGCTCGCTATGCTCGGTTA
CACGGCTGCGGCGAGCGCTAGTGATAATAAGTGACTGAGGTATGTGGTGT
TCTTATCTCCTTTTGTAGTGTTGCTCTTATTTTAAACAACTTTGCGGTTT
TTTGATGACTTTGCGATTTTGTTGTTGCTTTGCAGTAAATTGCAAGATTT
AATAAAAAAACGCAAAGCAATGATTAAAGGATGTTCAGAATGAAACTCAT
GGAAACACTTAACCAGTGCATAAACGCTGGTCATGAAATGACGAAGGCTA
TCGCCATTGCACAGTTTAATGATGACAGCCCGGAAGCGAGGAAAATAACC
CGGCGCTGGAGAATAGGTGAAGCAGCGGATTTAGTTGGGGTTTCTTCTCA
GGCTATCAGAGATGCCGAGAAAGCAGGGCGACTACCGCACCCGGATATGG
AAATTCGAGGACGGGTTGAGCAACGTGTTGGTTATACAATTGAACAAATT
AATCATATGCGTGATGTGTTTGGTACGCGATTGCGACGTGCTGAGGACGT
ATTTCCACCGGTGATCGGGGTTGCTGCCCATAAAGGTGGCGTTTACAAAA
CCTCAGTTTCTGTTCATCTTGCTCAGGATCTGGCTCTGAAGGGGCTACGT
GTTTTGCTCGTGGAAGGTAACGACCCCCAGGGAACAGCCTCAATGTATCA
CGGATGGGTACCAGATCTTCATATTCATGCAGAAGATACTCTCCTGCCTT
TCTATCTTGGGGAAAAGGACGATGTCACTTATGCAATAAAGCCCACTTGC
TGGCCGGGGCTTGACATTATTCCTTCCTGTCTGGCTCTGCACCGTATTGA
AACTGAGTTAATGGGCAAATTTGATGAAGGTAAACTGCCCACCGATCCAC
ACCTGATGCTCCGACTGGCCATTGAAACTGTTGCTCATGACTATGATGTC
ATAGTTATTGACAGCGCGCCTAACCTGGGTATCGGCACGATTAATGTCGT
ATGTGCTGCTGATGTGCTGATTGTTCCCACGCCTGCTGAGTIGTTTGACT
ACACCTCCGCACTGCAGTTTTTCGATATGCTTCGTGATCTGCTCAAGAAC
GTTGATCTTAAAGGGTTCGAGCCTGATGTACGTATTTTGCTTACCAAATA
CAGCAATAGTAATGGCTCTCAGTCCCCGTGGATGGAGGAGCAAATTCGGG
ATGCCTGGGGAAGCATGGTTCTAAAAAATGTTGTACGTGAAACGGATGAA
GTTGGTAAAGGTCAGATCCGGATGAGAACTGTTTTTGAACAGGCCATTGA
TCAACGCAGTTCAACTGGTGCCTGGAGAAATGCTCTTTCTATTTGGGAAC
CTGTCTGCAATGAAATTTTCGATCGTCTGATTAAACCACGCTGGGAGATT
AGATAATGAAGCGTGCGCCTGTTATTCCAAAACATACGCTCAATACTCAA
CCGGTTGAAGATACTTCGTTATCGACACCAGCTGCCCCGATGGTGGATTC
GTTAATTGCGCGCGTAGGAGTAATGGCTCGCGGTAATGCCATTACTTTGC
CTGTATGTGGTCGGGATGTGAAGTTTACTCTTGAAGTGCTCCGGGGTGAT
AGTGTTGAGAAAACCTCTCGGGTATGGTCAGGTAATGAACGTGACCAGGA
GCTGCTTACTGAGGACGCACTGGATGATCTCATCCCTTCTTTTCTACTGA
CTGGTCAACAGACACCGGCGTTCGGTCGAAGAGTATCTGGTGTCATAGAA
ATTGCCGATGGGAGTCGCCGTCGTAAAGCTGCTGCACTTACCGAAAGTGA
TTATCGTGTTCTGGTTGGCGAGCTGGATGATGAGCAGATGGCTGCATTAT
CCAGATTGGGTAACGATTATCGCCCAACAAGTGCTTATGAACGTGGTCAG
CGTTATGCAAGCCGATTGCAGAATGAATTTGCTGGAAATATTTCTGCGCT
GGCTGATGCGGAAAATATTTCACGTAAGATTATTACCCGCTGTATCAACA
CCGCCAAATTGCCTAAATCAGTTGTTGCTCTTTTTTCTCACCCCGGTGAA
CTATCTGCCCGGTCAGGTGATGCACTTCAAAAAGCCTTTACAGATAAAGA
GGAATTACTTAAGCAGCAGGCATCTAACCTTCATGAGCAGAAAAAAGCTG
GGGTGATATTTGAAGCTGAAGAAGTTATCACTCTTTTAACTTCTGTGCTT
AAAACGTCATCTGCATCAAGAACTAGTTTAAGCTCACGACATCAGTTTGC
TCCTGGAGCGACAGTATTGTATAAGGGCGATAAAATGGTGCTTAACCTGG
ACAGGTCACGTGTTCCAACTGAGTGTATAGAGAAAATTGAGGCCATTCTT
AAGGAACTTGAAAAGCCAGCACCCTGATGCGACCACGTTTTAGTCTACGT
TTATCTGTCTTTACTTAATGTCCTTTGTTACAGGCCAGAAAGCATAACTG
GCCTGAATATTCTCTCTGGGCCCACTGTTCCACTTGTATCGTCGGTCTGA
TAATCAGACTGGGACCACGGTCCCACTCGTATCGTCGGTCTGATTATTAG
TCTGGGACCACGGTCCCACTCGTATCGTCGGTCTGATTATTAGTCTGGGA
CCACGGTCCCACTCGTATCGTCGGTCTGATAATCAGACTGGGACCACGGT
CCCACTCGTATCGTCGGTCTGATTATTAGTCTGGGACCATGGTCCCACTC
GTATCGTCGGTCTGATTATTAGTCTGGGACCACGGTCCCACTCGTATCGT
CGGTCTGATTATTAGTCTGGAACCACGGTCCCACTCGTATCGTCGGTCTG
ATTATTAGTCTGGGACCACGGTCCCACTCGTATCGTCGGTCTGATTATTA
GTCTGGGACCACGATCCCACTCGTGTTGTCGGTCTGATTATCGGTCTGGG
ACCACGGTCCCACTTGTATTGTCGATCAGACTATCAGCGTGAGACTACGA
TTCCATCAATGCCTGTCAAGGGCAAGTATTGACATGTCGTCGTAACCTGT
AGAACGGAGTAACCTCGGTGTGCGGTTGTATGCCTGCTGTGGATTGCTGC
TGTGTCCTGCTTATCCACAACATTTTGCGCACGGTTATGTGGACAAAATA
CCTGGTTACCCAGGCCGTGCCGGCACGTTAACCGGGCTGCATCCGATGCA
AGTGTGTCGCTGTCGACGCAAGCGGCCGCA
>pMXBG_G7F
(SEQ ID NO: 45)

[chemical structure]

CATATATACTTTAGATTGATTTAAAACTTCATTTTTAATTTAAAAGGATC
TAGGTGAAGATCCTTTTTGATAATCTCATGACCAAAATCCCTTAACGTGA
GTTTTCGTTCCACTGAGCGTCAGACCCCGTAGAAAAGATCAAAGGATCTT
CTTGAGATCCTTTTTTTCTGCGCGTAATCTGCTGCTTGCAAACAAAAAAA
CCACCGCTACCAGCGGTGGTTTGTTTGCCGGATCAAGAGCTACCAACTCT
TTTTCCGAAGGTAACTGGCTTCAGCAGAGCGCAGATACCAAATACTGTCC
TTCTAGTGTAGCCGTAGTTAGGCCACCACTTCAAGAACTCTGTAGCACCG
CCTACATACCTCGCTCTGCTAATCCTGTTACCAGTGGCTGCTGCCAGTGG
CGATAAGTCGTGTCTTACCGGGTTGGACTCAAGACGATAGTTACCGGATA
AGGCGCAGCGGTCGGGCTGAACGGGGGGTTCGTGCACACAGCCCAGCTTG
GAGCGAACGACCTACACCGAACTGAGATACCTACAGCGTGAGCTATGAGA
AAGCGCCACGCTTCCCGAAGGGAGAAAGGCGGACAGGTATCCGGTAAGCG
GCAGGGTCGGAACAGGAGAGCGCACGAGGGAGCTTCCAGGGGGAAACGCC
TGGTATCTTTATAGTCCTGTCGGGTTTCGCCACCTCTGACTTGAGCGTCG
ATTTTTGTGATGCTCGTCAGGGGGGCGGAGCCTATGGAAAAACGCCAGCA
ACGCGGCCTTTTTACGGTTCCTGGCCTTTTGCTGGCCTTTTGCTCACATG
TTCTTTCCTGCGTTATCCCCTGATTCTGTGGATAACCGTATTACCGCCTT
TGAGTGAGCTGATACCGCTCGCCGCAGCCGAACGACCGAGCGCAGCGAGT
CAGTGAGCGAGGAAGCGGATGAGCGCCCAATACGCAAACCGCCTCTCCCC
GCGCGTTGGCCGATTCATTAATGCAGCTGGCACGACAGGTTTCCCGACTG
GAAAGCGGGCAGTGAGCGCAACGCAATTAATGTGAGTTAGCTCACTCATT
AGGCACCCCAGGCTTTACACTTTATGCTTCCGGCTCGTATGTTGTGTGGA
ATTGTGAGCGGATAACAATTTCACACAGGAAACAGCTATGACCATGATTA
CGCCAAGCTTGCATGCCTGCAGGTCGACTCTAGAGGATCCCCGGGTACCG
AGCTCGAATTCACTGGCCGTCGTTTTACAACGTCGTGACTGGGAAAACCC
TGGCGTTACCCAACTTAATCGCCTTGCAGCACATCCCCCTTTCGCCAGCT
GGCGTAATAGCGAAGAGGCCCGCACCGATCGCCCTTCCCAACAGTTGCGC
AGCCTGAATGGCGAATGGCGCCTGATGCGGTATTTTCTCCTTACGCATCT
GTGCGGTATTTCACACCGCATATGGTGCACTCTCAGTACAATCTGCTCTG
ATGCCGCATAGTTAAGCCAGCCCCGACACCCGCCAACACCCGCTGACGCG
CCCTGACGGGCTTGTCTGCTCCCGGCATCCGCTTACAGACAAGCTGTGAC

[chemical structure]

GCCGCACGAATCCATGTGGGAGTTTATTCTTGACACAGATATTTATGATA
TAATAACTGAGTAAGCTTAACATAAGGAGGAAAAACATATGTTACGCAGC
AGCAACGATGTTACGCAGCAGGGCAGTCGCCCTAAAACAAAGTTAGGTGG
CTCAAGTATGGGCATCATTCGCACATGTAGGCTCGGCCCTGACCAAGTCA
AATCCATGCGGGCTGCTCTTGATCTTTTCGGTCGTGAGTTCGGAGACGTA
GCCACCTACTCCCAACATCAGCCGGACTCCGATTACCTCGGGAACTTGCT
CCGTAGTAAGACATTCATCGCGCTTGCTGCCTTCGACCAAGAAGCGGTTG
TTGGCGCTCTCGCGGCTTACGTTCTGCCCAAGTTTGAGCAGCCGCGTAGT
GAGATCTATATCTATGATCTCGCAGTCTCCGGCGAGCACCGGAGGCAGGG
CATTGCCACCGCGCTCATCAATCTCCTCAAGCATGAGGCCAACGCGCTTG
GTGCTTATGTGATCTACGTGCAAGCAGATTACGGTGACGATCCCGCAGTG
GCTCTCTATACAAAGTTGGGCATACGGGAAGAAGTGATGCACTTTGATAT
CGACCCAAGTACCGCCACCTAAGAGCTGGAGCGGCGTAACCGTCGCACAG
GAAGGACAGAGAAAGCGCGGATCTGGGAAGTGACGGACAGAACGGTCAGG
ACCTGGATTGGGGAGGCGGTTGCCGCCGCTGCTGCTGACGGTGTGACGTT
CTCTGTTCCGGTCACACCACATACGTTCCGCCATTCCTATGCGATGCACA
TGCTGTATGCCGGTATACCGCTGAAAGTTCTGCAAAGCCTGATGGGACAT
AAGTCCATCAGTTCAACGGAAGTCTACACGAAGGTTTTTGCGCTGGATGT
GGCTGCCCGGCTCCGGGTGCAGTTTGCGATGCCGGAGTCTGATGCGGTTG
CGATGCTGAAACAATTATCCTGAGAATAAATGCCTTGGCCTTTATATGGA
AATGTGGAACTGAGTGGATATGCTGTTTTTGTCTGTTAAACAGAGAAGCT
GGCTGTTATCCACTGAGAAGCGAACGAAACAGTCGGGAAAATCTCCCATT
ATCGTAGAGATCCGCATTATTAATCTCAGGAGCCTGTGTAGCGTTTATAG
GAAGTAGTGTTCTGTCATGATGCCTGCAAGCGGTAACGAAAACGATTTGA
ATATGCCTTCAGGAACAATAGAAATCTTCGTGCGGTGTTACGTTGAAGTG
GAGCGGATTATGTCAGCAATGGACAGAACAACCTAATGAACACAGAACCA
TGATGTGGTCTGTCCTTTTACAGCCAGTAGTGCTCGCCGCAGTCGAGCGA
CAGGGCGAAGCCCTCGAGTGAGCGAGGAAGCACCAGGGAACAGCACTTAT
ATATTCTGCTTACACACGATGCCTGAAAAAACTTCCCTTGGGGTTATCCA
CTTATCCACGGGGATATTTTTATAATTATTTTTTTTATAGTTTTTAGATC
TTCTTTTTTAGAGCGCCTTGTAGGCCTTTATCCATGCTGGTTCTAGAGAA
GGTGTTGTGACAAATTGCCCTTTCAGTGTGACAAATCACCCTCAAATGAC
AGTCCTGTCTGTGACAAATTGCCCTTAACCCTGTGACAAATTGCCCTCAG
AAGAAGCTGTTTTTTCACAAAGTTATCCCTGCTTATTGACTCTTTTTTAT
TTAGTGTGACAATCTAAAAACTTGTCACACTTCACATGGATCTGTCATGG
CGGAAACAGCGGTTATCAATCACAAGAAACGTAAAAATAGCCCGCGAATC
GTCCAGTCAAACGACCTCACTGAGGCGGCATATAGTCTCTCCCGGGATCA
AAAACGTATGCTGTATCTGTTCGTTGACCAGATCAGAAAATCTGATGGCA
CCCTACAGGAACATGACGGTATCTGCGAGATCCATGTTGCTAAATATGCT
GAAATATTCGGATTGACCTCTGCGGAAGCCAGTAAGGATATACGGCAGGC
ATTGAAGAGTTTCGCGGGGAAGGAAGTGGTTTTTTATCGCCCTGAAGAGG
ATGCCGGCGATGAAAAAGGCTATGAATCTTTTCCTTGGTTTATCAAACGT
GCGCACAGTCCATCCAGAGGGCTTTACAGTGTACATATCAACCCATATCT
CATTCCCTTCTTTATCGGGTTACAGAACCGGTTTACGCAGTTTCGGCTTA
GTGAAACAAAAGAAATCACCAATCCGTATGCCATGCGTTTATACGAATCC
CTGTGTCAGTATCGTAAGCCGGATGGCTCAGGCATCGTGTCTCTGAAAAT
CGACTGGATCATAGAGCGTTACCAGCTGCCTCAAAGTTACCAGCGTATGC
CTGACTTCCGCCGCCGCTTCCTGCAGGTCTGTGTTAATGAGATCAACAGC
AGAACTCCAATGCGCCTCTCATACATTGAGAAAAAGAAAGGCCGCCAGAC
GACTCATATCGTATTTTCCTTCCGCGATATCACTTCCATGACGACAGGAT
AGTCTGAGGGTTATCTGTCACAGATTTGAGGGTGGTTCGTCACATTTGTT
CTGACCTACTGAGGGTAATTTGTCACAGTTTTGCTGTTTCCTTCAGCCTG
CATGGATTTTCTCATACTTTTTGAACTGTAATTTTTAAGGAAGCCAAATT
TGAGGGCAGTTTGTCACAGTTGATTTCCTTCTCTTTCCCTTCGTCATGTG
ACCTGATATCGGGGGTTAGTTCGTCATCATTGATGAGGGTTGATTATCAC
AGTTTATTACTCTGAATTGGCTATCCGCGTGTGTACCTCTACCTGGAGTT
TTTCCCACGGTGGATATTTCTTCTTGCGCTGAGCGTAAGAGCTATCTGAC
AGAACAGTTCTTCTTTGCTTCCTCGCCAGTTCGCTCGCTATGCTCGGTTA
CACGGCTGCGGCGAGCGCTAGTGATAATAAGTGACTGAGGTATGTGGTGT
TCTTATCTCCTTTTGTAGTGTTGCTCTTATTTTAAACAACTTTGCGGTTT
TTTGATGACTTTGCGATTTTGTTGTTGCTTTGCAGTAAATTGCAAGATTT
AATAAAAAAACGCAAAGCAATGATTAAAGGATGTTCAGAATGAAACTCAT
GGAAACACTTAACCAGTGCATAAACGCTGGTCATGAAATGACGAAGGCTA
TCGCCATTGCACAGTTTAATGATGACAGCCCGGAAGCGAGGAAAATAACC
CGGCGCTGGAGAATAGGTGAAGCAGCGGATTTAGTTGGGGTTTCTTCTCA
GGCTATCAGAGATGCCGAGAAAGCAGGGCGACTACCGCACCCGGATATGG
AAATTCGAGGACGGGTTGAGCAACGTGTTGGTTATACAATTGAACAAATT
AATCATATGCGTGATGTGTTTGGTACGCGATTGCGACGTGCTGAGGACGT
ATTTCCACCGGTGATCGGGGTTGCTGCCCATAAAGGTGGCGTTTACAAAA
CCTCAGTTTCTGTTCATCTTGCTCAGGATCTGGCTCTGAAGGGGCTACGT
GTTTTGCTCGTGGAAGGTAACGACCCCCAGGGAACAGCCTCAATGTATCA
CGGATGGGTACCAGATCTTCATATTCATGCAGAAGATACTCTCCTGCCTT
TCTATCTTGGGGAAAAGGACGATGTCACTTATGCAATAAAGCCCACTTGC
TGGCCGGGGCTTGACATTATTCCTTCCTGTCTGGCTCTGCACCGTATTGA
AACTGAGTTAATGGGCAAATTTGATGAAGGTAAACTGCCCACCGATCCAC
ACCTGATGCTCCGACTGGCCATTGAAACTGTTGCTCATGACTATGATGTC
ATAGTTATTGACAGCGCGCCTAACCTGGGTATCGGCACGATTAATGTCGT
ATGTGCTGCTGATGTGCTGATTGTTCCCACGCCTGCTGAGTIGTTTGACT
ACACCTCCGCACTGCAGTTTTTCGATATGCTTCGTGATCTGCTCAAGAAC
GTTGATCTTAAAGGGTTCGAGCCTGATGTACGTATTTTGCTTACCAAATA
CAGCAATAGTAATGGCTCTCAGTCCCCGTGGATGGAGGAGCAAATTCGGG
ATGCCTGGGGAAGCATGGTTCTAAAAAATGTTGTACGTGAAACGGATGAA
GTTGGTAAAGGTCAGATCCGGATGAGAACTGTTTTTGAACAGGCCATTGA
TCAACGCAGTTCAACTGGTGCCTGGAGAAATGCTCTTTCTATTTGGGAAC
CTGTCTGCAATGAAATTTTCGATCGTCTGATTAAACCACGCTGGGAGATT
AGATAATGAAGCGTGCGCCTGTTATTCCAAAACATACGCTCAATACTCAA
CCGGTTGAAGATACTTCGTTATCGACACCAGCTGCCCCGATGGTGGATTC
GTTAATTGCGCGCGTAGGAGTAATGGCTCGCGGTAATGCCATTACTTTGC
CTGTATGTGGTCGGGATGTGAAGTTTACTCTTGAAGTGCTCCGGGGTGAT
AGTGTTGAGAAAACCTCTCGGGTATGGTCAGGTAATGAACGTGACCAGGA
GCTGCTTACTGAGGACGCACTGGATGATCTCATCCCTTCTTTTCTACTGA
CTGGTCAACAGACACCGGCGTTCGGTCGAAGAGTATCTGGTGTCATAGAA
ATTGCCGATGGGAGTCGCCGTCGTAAAGCTGCTGCACTTACCGAAAGTGA
TTATCGTGTTCTGGTTGGCGAGCTGGATGATGAGCAGATGGCTGCATTAT
CCAGATTGGGTAACGATTATCGCCCAACAAGTGCTTATGAACGTGGTCAG
CGTTATGCAAGCCGATTGCAGAATGAATTTGCTGGAAATATTTCTGCGCT
GGCTGATGCGGAAAATATTTCACGTAAGATTATTACCCGCTGTATCAACA
CCGCCAAATTGCCTAAATCAGTTGTTGCTCTTTTTTCTCACCCCGGTGAA
CTATCTGCCCGGTCAGGTGATGCACTTCAAAAAGCCTTTACAGATAAAGA
GGAATTACTTAAGCAGCAGGCATCTAACCTTCATGAGCAGAAAAAAGCTG
GGGTGATATTTGAAGCTGAAGAAGTTATCACTCTTTTAACTTCTGTGCTT
AAAACGTCATCTGCATCAAGAACTAGTTTAAGCTCACGACATCAGTTTGC
TCCTGGAGCGACAGTATTGTATAAGGGCGATAAAATGGTGCTTAACCTGG
ACAGGTCACGTGTTCCAACTGAGTGTATAGAGAAAATTGAGGCCATTCTT
AAGGAACTTGAAAAGCCAGCACCCTGATGCGACCACGTTTTAGTCTACGT
TTATCTGTCTTTACTTAATGTCCTTTGTTACAGGCCAGAAAGCATAACTG
GCCTGAATATTCTCTCTGGGCCCACTGTTCCACTTGTATCGTCGGTCTGA
TAATCAGACTGGGACCACGGTCCCACTCGTATCGTCGGTCTGATTATTAG
TCTGGGACCACGGTCCCACTCGTATCGTCGGTCTGATTATTAGTCTGGGA
CCACGGTCCCACTCGTATCGTCGGTCTGATAATCAGACTGGGACCACGGT
CCCACTCGTATCGTCGGTCTGATTATTAGTCTGGGACCATGGTCCCACTC
GTATCGTCGGTCTGATTATTAGTCTGGGACCACGGTCCCACTCGTATCGT
CGGTCTGATTATTAGTCTGGAACCACGGTCCCACTCGTATCGTCGGTCTG
ATTATTAGTCTGGGACCACGGTCCCACTCGTATCGTCGGTCTGATTATTA
GTCTGGGACCACGATCCCACTCGTGTTGTCGGTCTGATTATCGGTCTGGG
ACCACGGTCCCACTTGTATTGTCGATCAGACTATCAGCGTGAGACTACGA
TTCCATCAATGCCTGTCAAGGGCAAGTATTGACATGTCGTCGTAACCTGT
AGAACGGAGTAACCTCGGTGTGCGGTTGTATGCCTGCTGTGGATTGCTGC
TGTGTCCTGCTTATCCACAACATTTTGCGCACGGTTATGTGGACAAAATA
CCTGGTTACCCAGGCCGTGCCGGCACGTTAACCGGGCTGCATCCGATGCA
AGTGTGTCGCTGTCGACGCAAGCGGCCGCA
>pMXBG_F7E
(SEQ ID NO: 46)

[chemical structure]

CATATATACTTTAGATTGATTTAAAACTTCATTTTTAATTTAAAAGGATC
TAGGTGAAGATCCTTTTTGATAATCTCATGACCAAAATCCCTTAACGTGA
GTTTTCGTTCCACTGAGCGTCAGACCCCGTAGAAAAGATCAAAGGATCTT
CTTGAGATCCTTTTTTTCTGCGCGTAATCTGCTGCTTGCAAACAAAAAAA
CCACCGCTACCAGCGGTGGTTTGTTTGCCGGATCAAGAGCTACCAACTCT
TTTTCCGAAGGTAACTGGCTTCAGCAGAGCGCAGATACCAAATACTGTCC
TTCTAGTGTAGCCGTAGTTAGGCCACCACTTCAAGAACTCTGTAGCACCG
CCTACATACCTCGCTCTGCTAATCCTGTTACCAGTGGCTGCTGCCAGTGG
CGATAAGTCGTGTCTTACCGGGTTGGACTCAAGACGATAGTTACCGGATA
AGGCGCAGCGGTCGGGCTGAACGGGGGGTTCGTGCACACAGCCCAGCTTG
GAGCGAACGACCTACACCGAACTGAGATACCTACAGCGTGAGCTATGAGA
AAGCGCCACGCTTCCCGAAGGGAGAAAGGCGGACAGGTATCCGGTAAGCG
GCAGGGTCGGAACAGGAGAGCGCACGAGGGAGCTTCCAGGGGGAAACGCC
TGGTATCTTTATAGTCCTGTCGGGTTTCGCCACCTCTGACTTGAGCGTCG
ATTTTTGTGATGCTCGTCAGGGGGGCGGAGCCTATGGAAAAACGCCAGCA
ACGCGGCCTTTTTACGGTTCCTGGCCTTTTGCTGGCCTTTTGCTCACATG
TTCTTTCCTGCGTTATCCCCTGATTCTGTGGATAACCGTATTACCGCCTT
TGAGTGAGCTGATACCGCTCGCCGCAGCCGAACGACCGAGCGCAGCGAGT
CAGTGAGCGAGGAAGCGGATGAGCGCCCAATACGCAAACCGCCTCTCCCC
GCGCGTTGGCCGATTCATTAATGCAGCTGGCACGACAGGTTTCCCGACTG
GAAAGCGGGCAGTGAGCGCAACGCAATTAATGTGAGTTAGCTCACTCATT
AGGCACCCCAGGCTTTACACTTTATGCTTCCGGCTCGTATGTTGTGTGGA
ATTGTGAGCGGATAACAATTTCACACAGGAAACAGCTATGACCATGATTA
CGCCAAGCTTGCATGCCTGCAGGTCGACTCTAGAGGATCCCCGGGTACCG
AGCTCGAATTCACTGGCCGTCGTTTTACAACGTCGTGACTGGGAAAACCC
TGGCGTTACCCAACTTAATCGCCTTGCAGCACATCCCCCTTTCGCCAGCT
GGCGTAATAGCGAAGAGGCCCGCACCGATCGCCCTTCCCAACAGTTGCGC
AGCCTGAATGGCGAATGGCGCCTGATGCGGTATTTTCTCCTTACGCATCT
GTGCGGTATTTCACACCGCATATGGTGCACTCTCAGTACAATCTGCTCTG
ATGCCGCATAGTTAAGCCAGCCCCGACACCCGCCAACACCCGCTGACGCG
CCCTGACGGGCTTGTCTGCTCCCGGCATCCGCTTACAGACAAGCTGTGAC

[chemical structure]

GCCGCACGAATCCATGTGGGAGTTTATTCTTGACACAGATATTTATGATA
TAATAACTGAGTAAGCTTAACATAAGGAGGAAAAACATATGTTACGCAGC
AGCAACGATGTTACGCAGCAGGGCAGTCGCCCTAAAACAAAGTTAGGTGG
CTCAAGTATGGGCATCATTCGCACATGTAGGCTCGGCCCTGACCAAGTCA
AATCCATGCGGGCTGCTCTTGATCTTTTCGGTCGTGAGTTCGGAGACGTA
GCCACCTACTCCCAACATCAGCCGGACTCCGATTACCTCGGGAACTTGCT
CCGTAGTAAGACATTCATCGCGCTTGCTGCCTTCGACCAAGAAGCGGTTG
TTGGCGCTCTCGCGGCTTACGTTCTGCCCAAGTTTGAGCAGCCGCGTAGT
GAGATCTATATCTATGATCTCGCAGTCTCCGGCGAGCACCGGAGGCAGGG
CATTGCCACCGCGCTCATCAATCTCCTCAAGCATGAGGCCAACGCGCTTG
GTGCTTATGTGATCTACGTGCAAGCAGATTACGGTGACGATCCCGCAGTG
GCTCTCTATACAAAGTTGGGCATACGGGAAGAAGTGATGCACTTTGATAT
CGACCCAAGTACCGCCACCTAAGAGCTGGAGCGGCGTAACCGTCGCACAG
GAAGGACAGAGAAAGCGCGGATCTGGGAAGTGACGGACAGAACGGTCAGG
ACCTGGATTGGGGAGGCGGTTGCCGCCGCTGCTGCTGACGGTGTGACGTT
CTCTGTTCCGGTCACACCACATACGTTCCGCCATTCCTATGCGATGCACA
TGCTGTATGCCGGTATACCGCTGAAAGTTCTGCAAAGCCTGATGGGACAT
AAGTCCATCAGTTCAACGGAAGTCTACACGAAGGTTTTTGCGCTGGATGT
GGCTGCCCGGCTCCGGGTGCAGTTTGCGATGCCGGAGTCTGATGCGGTTG
CGATGCTGAAACAATTATCCTGAGAATAAATGCCTTGGCCTTTATATGGA
AATGTGGAACTGAGTGGATATGCTGTTTTTGTCTGTTAAACAGAGAAGCT
GGCTGTTATCCACTGAGAAGCGAACGAAACAGTCGGGAAAATCTCCCATT
ATCGTAGAGATCCGCATTATTAATCTCAGGAGCCTGTGTAGCGTTTATAG
GAAGTAGTGTTCTGTCATGATGCCTGCAAGCGGTAACGAAAACGATTTGA
ATATGCCTTCAGGAACAATAGAAATCTTCGTGCGGTGTTACGTTGAAGTG
GAGCGGATTATGTCAGCAATGGACAGAACAACCTAATGAACACAGAACCA
TGATGTGGTCTGTCCTTTTACAGCCAGTAGTGCTCGCCGCAGTCGAGCGA
CAGGGCGAAGCCCTCGAGTGAGCGAGGAAGCACCAGGGAACAGCACTTAT
ATATTCTGCTTACACACGATGCCTGAAAAAACTTCCCTTGGGGTTATCCA
CTTATCCACGGGGATATTTTTATAATTATTTTTTTTATAGTTTTTAGATC
TTCTTTTTTAGAGCGCCTTGTAGGCCTTTATCCATGCTGGTTCTAGAGAA
GGTGTTGTGACAAATTGCCCTTTCAGTGTGACAAATCACCCTCAAATGAC
AGTCCTGTCTGTGACAAATTGCCCTTAACCCTGTGACAAATTGCCCTCAG
AAGAAGCTGTTTTTTCACAAAGTTATCCCTGCTTATTGACTCTTTTTTAT
TTAGTGTGACAATCTAAAAACTTGTCACACTTCACATGGATCTGTCATGG
CGGAAACAGCGGTTATCAATCACAAGAAACGTAAAAATAGCCCGCGAATC
GTCCAGTCAAACGACCTCACTGAGGCGGCATATAGTCTCTCCCGGGATCA
AAAACGTATGCTGTATCTGTTCGTTGACCAGATCAGAAAATCTGATGGCA
CCCTACAGGAACATGACGGTATCTGCGAGATCCATGTTGCTAAATATGCT
GAAATATTCGGATTGACCTCTGCGGAAGCCAGTAAGGATATACGGCAGGC
ATTGAAGAGTTTCGCGGGGAAGGAAGTGGTTTTTTATCGCCCTGAAGAGG
ATGCCGGCGATGAAAAAGGCTATGAATCTTTTCCTTGGTTTATCAAACGT
GCGCACAGTCCATCCAGAGGGCTTTACAGTGTACATATCAACCCATATCT
CATTCCCTTCTTTATCGGGTTACAGAACCGGTTTACGCAGTTTCGGCTTA
GTGAAACAAAAGAAATCACCAATCCGTATGCCATGCGTTTATACGAATCC
CTGTGTCAGTATCGTAAGCCGGATGGCTCAGGCATCGTGTCTCTGAAAAT
CGACTGGATCATAGAGCGTTACCAGCTGCCTCAAAGTTACCAGCGTATGC
CTGACTTCCGCCGCCGCTTCCTGCAGGTCTGTGTTAATGAGATCAACAGC
AGAACTCCAATGCGCCTCTCATACATTGAGAAAAAGAAAGGCCGCCAGAC
GACTCATATCGTATTTTCCTTCCGCGATATCACTTCCATGACGACAGGAT
AGTCTGAGGGTTATCTGTCACAGATTTGAGGGTGGTTCGTCACATTTGTT
CTGACCTACTGAGGGTAATTTGTCACAGTTTTGCTGTTTCCTTCAGCCTG
CATGGATTTTCTCATACTTTTTGAACTGTAATTTTTAAGGAAGCCAAATT
TGAGGGCAGTTTGTCACAGTTGATTTCCTTCTCTTTCCCTTCGTCATGTG
ACCTGATATCGGGGGTTAGTTCGTCATCATTGATGAGGGTTGATTATCAC
AGTTTATTACTCTGAATTGGCTATCCGCGTGTGTACCTCTACCTGGAGTT
TTTCCCACGGTGGATATTTCTTCTTGCGCTGAGCGTAAGAGCTATCTGAC
AGAACAGTTCTTCTTTGCTTCCTCGCCAGTTCGCTCGCTATGCTCGGTTA
CACGGCTGCGGCGAGCGCTAGTGATAATAAGTGACTGAGGTATGTGGTGT
TCTTATCTCCTTTTGTAGTGTTGCTCTTATTTTAAACAACTTTGCGGTTT
TTTGATGACTTTGCGATTTTGTTGTTGCTTTGCAGTAAATTGCAAGATTT
AATAAAAAAACGCAAAGCAATGATTAAAGGATGTTCAGAATGAAACTCAT
GGAAACACTTAACCAGTGCATAAACGCTGGTCATGAAATGACGAAGGCTA
TCGCCATTGCACAGTTTAATGATGACAGCCCGGAAGCGAGGAAAATAACC
CGGCGCTGGAGAATAGGTGAAGCAGCGGATTTAGTTGGGGTTTCTTCTCA
GGCTATCAGAGATGCCGAGAAAGCAGGGCGACTACCGCACCCGGATATGG
AAATTCGAGGACGGGTTGAGCAACGTGTTGGTTATACAATTGAACAAATT
AATCATATGCGTGATGTGTTTGGTACGCGATTGCGACGTGCTGAGGACGT
ATTTCCACCGGTGATCGGGGTTGCTGCCCATAAAGGTGGCGTTTACAAAA
CCTCAGTTTCTGTTCATCTTGCTCAGGATCTGGCTCTGAAGGGGCTACGT
GTTTTGCTCGTGGAAGGTAACGACCCCCAGGGAACAGCCTCAATGTATCA
CGGATGGGTACCAGATCTTCATATTCATGCAGAAGATACTCTCCTGCCTT
TCTATCTTGGGGAAAAGGACGATGTCACTTATGCAATAAAGCCCACTTGC
TGGCCGGGGCTTGACATTATTCCTTCCTGTCTGGCTCTGCACCGTATTGA
AACTGAGTTAATGGGCAAATTTGATGAAGGTAAACTGCCCACCGATCCAC
ACCTGATGCTCCGACTGGCCATTGAAACTGTTGCTCATGACTATGATGTC
ATAGTTATTGACAGCGCGCCTAACCTGGGTATCGGCACGATTAATGTCGT
ATGTGCTGCTGATGTGCTGATTGTTCCCACGCCTGCTGAGTTGTTTGACT
ACACCTCCGCACTGCAGTTTTTCGATATGCTTCGTGATCTGCTCAAGAAC
GTTGATCTTAAAGGGTTCGAGCCTGATGTACGTATTTTGCTTACCAAATA
CAGCAATAGTAATGGCTCTCAGTCCCCGTGGATGGAGGAGCAAATTCGGG
ATGCCTGGGGAAGCATGGTTCTAAAAAATGTTGTACGTGAAACGGATGAA
GTTGGTAAAGGTCAGATCCGGATGAGAACTGTTTTTGAACAGGCCATTGA
TCAACGCAGTTCAACTGGTGCCTGGAGAAATGCTCTTTCTATTTGGGAAC
CTGTCTGCAATGAAATTTTCGATCGTCTGATTAAACCACGCTGGGAGATT
AGATAATGAAGCGTGCGCCTGTTATTCCAAAACATACGCTCAATACTCAA
CCGGTTGAAGATACTTCGTTATCGACACCAGCTGCCCCGATGGTGGATTC
GTTAATTGCGCGCGTAGGAGTAATGGCTCGCGGTAATGCCATTACTTTGC
CTGTATGTGGTCGGGATGTGAAGTTTACTCTTGAAGTGCTCCGGGGTGAT
AGTGTTGAGAAAACCTCTCGGGTATGGTCAGGTAATGAACGTGACCAGGA
GCTGCTTACTGAGGACGCACTGGATGATCTCATCCCTTCTTTTCTACTGA
CTGGTCAACAGACACCGGCGTTCGGTCGAAGAGTATCTGGTGTCATAGAA
ATTGCCGATGGGAGTCGCCGTCGTAAAGCTGCTGCACTTACCGAAAGTGA
TTATCGTGTTCTGGTTGGCGAGCTGGATGATGAGCAGATGGCTGCATTAT
CCAGATTGGGTAACGATTATCGCCCAACAAGTGCTTATGAACGTGGTCAG
CGTTATGCAAGCCGATTGCAGAATGAATTTGCTGGAAATATTTCTGCGCT
GGCTGATGCGGAAAATATTTCACGTAAGATTATTACCCGCTGTATCAACA
CCGCCAAATTGCCTAAATCAGTTGTTGCTCTTTTTTCTCACCCCGGTGAA
CTATCTGCCCGGTCAGGTGATGCACTTCAAAAAGCCTTTACAGATAAAGA
GGAATTACTTAAGCAGCAGGCATCTAACCTTCATGAGCAGAAAAAAGCTG
GGGTGATATTTGAAGCTGAAGAAGTTATCACTCTTTTAACTTCTGTGCTT
AAAACGTCATCTGCATCAAGAACTAGTTTAAGCTCACGACATCAGTTTGC
TCCTGGAGCGACAGTATTGTATAAGGGCGATAAAATGGTGCTTAACCTGG
ACAGGTCACGTGTTCCAACTGAGTGTATAGAGAAAATTGAGGCCATTCTT
AAGGAACTTGAAAAGCCAGCACCCTGATGCGACCACGTTTTAGTCTACGT
TTATCTGTCTTTACTTAATGTCCTTTGTTACAGGCCAGAAAGCATAACTG
GCCTGAATATTCTCTCTGGGCCCACTGTTCCACTTGTATCGTCGGTCTGA
TAATCAGACTGGGACCACGGTCCCACTCGTATCGTCGGTCTGATTATTAG
TCTGGGACCACGGTCCCACTCGTATCGTCGGTCTGATTATTAGTCTGGGA
CCACGGTCCCACTCGTATCGTCGGTCTGATAATCAGACTGGGACCACGGT
CCCACTCGTATCGTCGGTCTGATTATTAGTCTGGGACCATGGTCCCACTC
GTATCGTCGGTCTGATTATTAGTCTGGGACCACGGTCCCACTCGTATCGT
CGGTCTGATTATTAGTCTGGAACCACGGTCCCACTCGTATCGTCGGTCTG
ATTATTAGTCTGGGACCACGGTCCCACTCGTATCGTCGGTCTGATTATTA
GTCTGGGACCACGATCCCACTCGTGTTGTCGGTCTGATTATCGGTCTGGG
ACCACGGTCCCACTTGTATTGTCGATCAGACTATCAGCGTGAGACTACGA
TTCCATCAATGCCTGTCAAGGGCAAGTATTGACATGTCGTCGTAACCTGT
AGAACGGAGTAACCTCGGTGTGCGGTTGTATGCCTGCTGTGGATTGCTGC
TGTGTCCTGCTTATCCACAACATTTTGCGCACGGTTATGTGGACAAAATA
CCTGGTTACCCAGGCCGTGCCGGCACGTTAACCGGGCTGCATCCGATGCA
AGTGTGTCGCTGTCGACGCAAGCGGCCGCA
>pMXBK_A7E
(SEQ ID NO: 47)

[chemical structure]

CATATATACTTTAGATTGATTTAAAACTTCATTTTTAATTTAAAAGGATC
TAGGTGAAGATCCTTTTTGATAATCTCATGACCAAAATCCCTTAACGTGA
GTTTTCGTTCCACTGAGCGTCAGACCCCGTAGAAAAGATCAAAGGATCTT
CTTGAGATCCTTTTTTTCTGCGCGTAATCTGCTGCTTGCAAACAAAAAAA
CCACCGCTACCAGCGGTGGTTTGTTTGCCGGATCAAGAGCTACCAACTCT
TTTTCCGAAGGTAACTGGCTTCAGCAGAGCGCAGATACCAAATACTGTCC
TTCTAGTGTAGCCGTAGTTAGGCCACCACTTCAAGAACTCTGTAGCACCG
CCTACATACCTCGCTCTGCTAATCCTGTTACCAGTGGCTGCTGCCAGTGG
CGATAAGTCGTGTCTTACCGGGTTGGACTCAAGACGATAGTTACCGGATA
AGGCGCAGCGGTCGGGCTGAACGGGGGGTTCGTGCACACAGCCCAGCTTG
GAGCGAACGACCTACACCGAACTGAGATACCTACAGCGTGAGCTATGAGA
AAGCGCCACGCTTCCCGAAGGGAGAAAGGCGGACAGGTATCCGGTAAGCG
GCAGGGTCGGAACAGGAGAGCGCACGAGGGAGCTTCCAGGGGGAAACGCC
TGGTATCTTTATAGTCCTGTCGGGTTTCGCCACCTCTGACTTGAGCGTCG
ATTTTTGTGATGCTCGTCAGGGGGGCGGAGCCTATGGAAAAACGCCAGCA
ACGCGGCCTTTTTACGGTTCCTGGCCTTTTGCTGGCCTTTTGCTCACATG
TTCTTTCCTGCGTTATCCCCTGATTCTGTGGATAACCGTATTACCGCCTT
TGAGTGAGCTGATACCGCTCGCCGCAGCCGAACGACCGAGCGCAGCGAGT
CAGTGAGCGAGGAAGCGGATGAGCGCCCAATACGCAAACCGCCTCTCCCC
GCGCGTTGGCCGATTCATTAATGCAGCTGGCACGACAGGTTTCCCGACTG
GAAAGCGGGCAGTGAGCGCAACGCAATTAATGTGAGTTAGCTCACTCATT
AGGCACCCCAGGCTTTACACTTTATGCTTCCGGCTCGTATGTTGTGTGGA
ATTGTGAGCGGATAACAATTTCACACAGGAAACAGCTATGACCATGATTA
CGCCAAGCTTGCATGCCTGCAGGTCGACTCTAGAGGATCCCCGGGTACCG
AGCTCGAATTCACTGGCCGTCGTTTTACAACGTCGTGACTGGGAAAACCC
TGGCGTTACCCAACTTAATCGCCTTGCAGCACATCCCCCTTTCGCCAGCT
GGCGTAATAGCGAAGAGGCCCGCACCGATCGCCCTTCCCAACAGTTGCGC
AGCCTGAATGGCGAATGGCGCCTGATGCGGTATTTTCTCCTTACGCATCT
GTGCGGTATTTCACACCGCATATGGTGCACTCTCAGTACAATCTGCTCTG
ATGCCGCATAGTTAAGCCAGCCCCGACACCCGCCAACACCCGCTGACGCG
CCCTGACGGGCTTGTCTGCTCCCGGCATCCGCTTACAGACAAGCTGTGAC

[chemical structure]

GCGGAACCCCTATTTGTTTATTTTTCTAAATACATTCAAATATGTATCCG
CTCATGAGACAATAACCCTGATAAATGCTTCAATAATATTGAAAAAGGAA
GAGTATGGCTAAAATGAGAATATCACCGGAATTGAAAAAACTGATCGAAA
AATACCGCTGCGTAAAAGATACGGAAGGAATGTCTCCTGCTAAGGTATAT
AAGCTGGTGGGAGAAAATGAAAACCTATATTTAAAAATGACGGACAGCCG
GTATAAAGGGACCACCTATGATGTGGAACGGGAAAAGGACATGATGCTAT
GGCTGGAAGGAAAGCTGCCTGTTCCAAAGGTCCTGCACTTTGAACGGCAT
GATGGCTGGAGCAATCTGCTCATGAGTGAGGCCGATGGCGTCCTTTGCTC
GGAAGAGTATGAAGATGAACAAAGCCCTGAAAAGATTATCGAGCTGTATG
CGGAGTGCATCAGGCTCTTTCACTCCATCGACATATCGGATTGTCCCTAT
ACGAATAGCTTAGACAGCCGCTTAGCCGAATTGGATTACTTACTGAATAA
CGATCTGGCCGATGTGGATTGCGAAAACTGGGAAGAGGACACTCCATTTA
AAGATCCGCGCGAGCTGTATGATTTTTTAAAGACGGAAAAGCCCGAAGAG
GAACTTGTCTTTTCCCACGGCGACCTGGGAGACAGCAACATCTTTGTGAA
AGATGGCAAAGTAAGTGGCTTTATTGATCTTGGGAGAAGCGGCAGGGCGG
ACAAGTGGTATGACATTGCCTTCTGCGTCCGGTCGCTCAGGGAGGATATC
GGGGAAGAACAGTATGTCGAGCTATTTTTTGACTTACTGGGGATCAAGCC
TGATTGGGAGAAAATAAAATATTATATTTTACTGGATGAATTGTTTTAGG
AGCTGGAGCGGCGTAACCGTCGCACAGGAAGGACAGAGAAAGCGCGGATC
TGGGAAGTGACGGACAGAACGGTCAGGACCTGGATTGGGGAGGCGGTTGC
CGCCGCTGCTGCTGACGGTGTGACGTTCTCTGTTCCGGTCACACCACATA
CGTTCCGCCATTCCTATGCGATGCACATGCTGTATGCCGGTATACCGCTG
AAAGTTCTGCAAAGCCTGATGGGACATAAGTCCATCAGTTCAACGGAAGT
CTACACGAAGGTTTTTGCGCTGGATGTGGCTGCCCGGCTCCGGGTGCAGT
TTGCGATGCCGGAGTCTGATGCGGTTGCGATGCTGAAACAATTATCCTGA
GAATAAATGCCTTGGCCTTTATATGGAAATGTGGAACTGAGTGGATATGC
TGTTTTTGTCTGTTAAACAGAGAAGCTGGCTGTTATCCACTGAGAAGCGA
ACGAAACAGTCGGGAAAATCTCCCATTATCGTAGAGATCCGCATTATTAA
TCTCAGGAGCCTGTGTAGCGTTTATAGGAAGTAGTGTTCTGTCATGATGC
CTGCAAGCGGTAACGAAAACGATTTGAATATGCCTTCAGGAACAATAGAA
ATCTTCGTGCGGTGTTACGTTGAAGTGGAGCGGATTATGTCAGCAATGGA
CAGAACAACCTAATGAACACAGAACCATGATGTGGTCTGTCCTTTTACAG
CCAGTAGTGCTCGCCGCAGTCGAGCGACAGGGCGAAGCCCTCGAGTGAGC
GAGGAAGCACCAGGGAACAGCACTTATATATTCTGCTTACACACGATGCC
TGAAAAAACTTCCCTTGGGGTTATCCACTTATCCACGGGGATATTTTTAT
AATTATTTTTTTTATAGTTTTTAGATCTTCTTTTTTAGAGCGCCTTGTAG
GCCTTTATCCATGCTGGTTCTAGAGAAGGTGTTGTGACAAATTGCCCTTT
CAGTGTGACAAATCACCCTCAAATGACAGTCCTGTCTGTGACAAATTGCC
CTTAACCCTGTGACAAATTGCCCTCAGAAGAAGCTGTTTTTTCACAAAGT
TATCCCTGCTTATTGACTCTTTTTTATTTAGTGTGACAATCTAAAAACTT
GTCACACTTCACATGGATCTGTCATGGCGGAAACAGCGGTTATCAATCAC
AAGAAACGTAAAAATAGCCCGCGAATCGTCCAGTCAAACGACCTCACTGA
GGCGGCATATAGTCTCTCCCGGGATCAAAAACGTATGCTGTATCTGTTCG
TTGACCAGATCAGAAAATCTGATGGCACCCTACAGGAACATGACGGTATC
TGCGAGATCCATGTTGCTAAATATGCTGAAATATTCGGATTGACCTCTGC
GGAAGCCAGTAAGGATATACGGCAGGCATTGAAGAGTTTCGCGGGGAAGG
AAGTGGTTTTTTATCGCCCTGAAGAGGATGCCGGCGATGAAAAAGGCTAT
GAATCTTTTCCTTGGTTTATCAAACGTGCGCACAGTCCATCCAGAGGGCT
TTACAGTGTACATATCAACCCATATCTCATTCCCTTCTTTATCGGGTTAC
AGAACCGGTTTACGCAGTTTCGGCTTAGTGAAACAAAAGAAATCACCAAT
CCGTATGCCATGCGTTTATACGAATCCCTGTGTCAGTATCGTAAGCCGGA
TGGCTCAGGCATCGTGTCTCTGAAAATCGACTGGATCATAGAGCGTTACC
AGCTGCCTCAAAGTTACCAGCGTATGCCTGACTTCCGCCGCCGCTTCCTG
CAGGTCTGTGTTAATGAGATCAACAGCAGAACTCCAATGCGCCTCTCATA
CATTGAGAAAAAGAAAGGCCGCCAGACGACTCATATCGTATTTTCCTTCC
GCGATATCACTTCCATGACGACAGGATAGTCTGAGGGTTATCTGTCACAG
ATTTGAGGGTGGTTCGTCACATTTGTTCTGACCTACTGAGGGTAATTTGT
CACAGTTTTGCTGTTTCCTTCAGCCTGCATGGATTTTCTCATACTTTTTG
AACTGTAATTTTTAAGGAAGCCAAATTTGAGGGCAGTTTGTCACAGTTGA
TTTCCTTCTCTTTCCCTTCGTCATGTGACCTGATATCGGGGGTTAGTTCG
TCATCATTGATGAGGGTTGATTATCACAGTTTATTACTCTGAATTGGCTA
TCCGCGTGTGTACCTCTACCTGGAGTTTTTCCCACGGTGGATATTTCTTC
TTGCGCTGAGCGTAAGAGCTATCTGACAGAACAGTTCTTCTTTGCTTCCT
CGCCAGTTCGCTCGCTATGCTCGGTTACACGGCTGCGGCGAGCGCTAGTG
ATAATAAGTGACTGAGGTATGTGGTGTTCTTATCTCCTTTTGTAGTGTTG
CTCTTATTTTAAACAACTTTGCGGTTTTTTGATGACTTTGCGATTTTGTT
GTTGCTTTGCAGTAAATTGCAAGATTTAATAAAAAAACGCAAAGCAATGA
TTAAAGGATGTTCAGAATGAAACTCATGGAAACACTTAACCAGTGCATAA
ACGCTGGTCATGAAATGACGAAGGCTATCGCCATTGCACAGTTTAATGAT
GACAGCCCGGAAGCGAGGAAAATAACCCGGCGCTGGAGAATAGGTGAAGC
AGCGGATTTAGTTGGGGTTTCTTCTCAGGCTATCAGAGATGCCGAGAAAG
CAGGGCGACTACCGCACCCGGATATGGAAATTCGAGGACGGGTTGAGCAA
CGTGTTGGTTATACAATTGAACAAATTAATCATATGCGTGATGTGTTTGG
TACGCGATTGCGACGTGCTGAGGACGTATTTCCACCGGTGATCGGGGTTG
CTGCCCATAAAGGTGGCGTTTACAAAACCTCAGTTTCTGTTCATCTTGCT
CAGGATCTGGCTCTGAAGGGGCTACGTGTTTTGCTCGTGGAAGGTAACGA
CCCCCAGGGAACAGCCTCAATGTATCACGGATGGGTACCAGATCTTCATA
TTCATGCAGAAGATACTCTCCTGCCTTTCTATCTTGGGGAAAAGGACGAT
GTCACTTATGCAATAAAGCCCACTTGCTGGCCGGGGCTTGACATTATTCC
TTCCTGTCTGGCTCTGCACCGTATTGAAACTGAGTTAATGGGCAAATTTG
ATGAAGGTAAACTGCCCACCGATCCACACCTGATGCTCCGACTGGCCATT
GAAACTGTTGCTCATGACTATGATGTCATAGTTATTGACAGCGCGCCTAA
CCTGGGTATCGGCACGATTAATGTCGTATGTGCTGCTGATGTGCTGATTG
TTCCCACGCCTGCTGAGTTGTTTGACTACACCTCCGCACTGCAGTTTTTC
GATATGCTTCGTGATCTGCTCAAGAACGTTGATCTTAAAGGGTTCGAGCC
TGATGTACGTATTTTGCTTACCAAATACAGCAATAGTAATGGCTCTCAGT
CCCCGTGGATGGAGGAGCAAATTCGGGATGCCTGGGGAAGCATGGTTCTA
AAAAATGTTGTACGTGAAACGGATGAAGTTGGTAAAGGTCAGATCCGGAT
GAGAACTGTTTTTGAACAGGCCATTGATCAACGCAGTTCAACTGGTGCCT
GGAGAAATGCTCTTTCTATTTGGGAACCTGTCTGCAATGAAATTTTCGAT
CGTCTGATTAAACCACGCTGGGAGATTAGATAATGAAGCGTGCGCCTGTT
ATTCCAAAACATACGCTCAATACTCAACCGGTTGAAGATACTTCGTTATC
GACACCAGCTGCCCCGATGGTGGATTCGTTAATTGCGCGCGTAGGAGTAA
TGGCTCGCGGTAATGCCATTACTTTGCCTGTATGTGGTCGGGATGTGAAG
TTTACTCTTGAAGTGCTCCGGGGTGATAGTGTTGAGAAAACCTCTCGGGT
ATGGTCAGGTAATGAACGTGACCAGGAGCTGCTTACTGAGGACGCACTGG
ATGATCTCATCCCTTCTTTTCTACTGACTGGTCAACAGACACCGGCGTTC
GGTCGAAGAGTATCTGGTGTCATAGAAATTGCCGATGGGAGTCGCCGTCG
TAAAGCTGCTGCACTTACCGAAAGTGATTATCGTGTTCTGGTTGGCGAGC
TGGATGATGAGCAGATGGCTGCATTATCCAGATTGGGTAACGATTATCGC
CCAACAAGTGCTTATGAACGTGGTCAGCGTTATGCAAGCCGATTGCAGAA
TGAATTTGCTGGAAATATTTCTGCGCTGGCTGATGCGGAAAATATTTCAC
GTAAGATTATTACCCGCTGTATCAACACCGCCAAATTGCCTAAATCAGTT
GTTGCTCTTTTTTCTCACCCCGGTGAACTATCTGCCCGGTCAGGTGATGC
ACTTCAAAAAGCCTTTACAGATAAAGAGGAATTACTTAAGCAGCAGGCAT
CTAACCTTCATGAGCAGAAAAAAGCTGGGGTGATATTTGAAGCTGAAGAA
GTTATCACTCTTTTAACTTCTGTGCTTAAAACGTCATCTGCATCAAGAAC
TAGTTTAAGCTCACGACATCAGTTTGCTCCTGGAGCGACAGTATTGTATA
AGGGCGATAAAATGGTGCTTAACCTGGACAGGTCACGTGTTCCAACTGAG
TGTATAGAGAAAATTGAGGCCATTCTTAAGGAACTTGAAAAGCCAGCACC
CTGATGCGACCACGTTTTAGTCTACGTTTATCTGTCTTTACTTAATGTCC
TTTGTTACAGGCCAGAAAGCATAACTGGCCTGAATATTCTCTCTGGGCCC
ACTGTTCCACTTGTATCGTCGGTCTGATAATCAGACTGGGACCACGGTCC
CACTCGTATCGTCGGTCTGATTATTAGTCTGGGACCACGGTCCCACTCGT
ATCGTCGGTCTGATTATTAGTCTGGGACCACGGTCCCACTCGTATCGTCG
GTCTGATAATCAGACTGGGACCACGGTCCCACTCGTATCGTCGGTCTGAT
TATTAGTCTGGGACCATGGTCCCACTCGTATCGTCGGTCTGATTATTAGT
CTGGGACCACGGTCCCACTCGTATCGTCGGTCTGATTATTAGTCTGGAAC
CACGGTCCCACTCGTATCGTCGGTCTGATTATTAGTCTGGGACCACGGTC
CCACTCGTATCGTCGGTCTGATTATTAGTCTGGGACCACGATCCCACTCG
TGTTGTCGGTCTGATTATCGGTCTGGGACCACGGTCCCACTTGTATTGTC
GATCAGACTATCAGCGTGAGACTACGATTCCATCAATGCCTGTCAAGGGC
AAGTATTGACATGTCGTCGTAACCTGTAGAACGGAGTAACCTCGGTGTGC
GGTTGTATGCCTGCTGTGGATTGCTGCTGTGTCCTGCTTATCCACAACAT
TTTGCGCACGGTTATGTGGACAAAATACCTGGTTACCCAGGCCGTGCCGG
CACGTTAACCGGGCTGCATCCGATGCAAGTGTGTCGCTGTCGACGCAAGC
GGCCGCA

The application's sequence listing, which the Patent Office published only in electronic form, follows.

SEQUENCE LISTING (1720 sequences)

SEQ ID NO: 1 - DNA, 16 bp, Artificial Sequence
  source: /note="Description of Artificial Sequence: Synthetic oligonucleotide"
  modified_base (4)..(5): a, c, t, g, unknown or other
  modified_base (12)..(16): a, c, t, g, unknown or other
gacnnggtctcnnnnn

SEQ ID NO: 2 - DNA, 14 bp, Artificial Sequence
  source: /note="Description of Artificial Sequence: Synthetic oligonucleotide"
  modified_base (9)..(14): a, c, t, g, unknown or other
gaagacgcnnnnnn

SEQ ID NO: 3 - DNA, 14 bp, Artificial Sequence
  source: /note="Description of Artificial Sequence: Synthetic oligonucleotide"
  modified_base (11)..(14): a, c, t, g, unknown or other
gaagctcttcnnnn

SEQ ID NO: 4 - DNA, 6 bp, Artificial Sequence
  source: /note="Description of Artificial Sequence: Synthetic oligonucleotide"
ggtctc

SEQ ID NO: 5 - DNA, 6 bp, Artificial Sequence
  source: /note="Description of Artificial Sequence: Synthetic oligonucleotide"
gaagac

SEQ ID NO: 6 - DNA, 7 bp, Artificial Sequence
  source: /note="Description of Artificial Sequence: Synthetic oligonucleotide"
gctcttc

SEQ ID NO: 7 - DNA, 9 bp, Artificial Sequence
  source: /note="Description of Artificial Sequence: Synthetic oligonucleotide"
  modified_base (4)..(6): a, c, t, g, unknown or other
gacnnngtc

SEQ ID NO: 8 - DNA, 5 bp, Artificial Sequence
  source: /note="Description of Artificial Sequence: Synthetic oligonucleotide"
gacgc

SEQ ID NO: 9 - DNA, 10 bp, Artificial Sequence
  source: /note="Description of Artificial Sequence: Synthetic oligonucleotide"
  modified_base (4)..(7): a, c, t, g, unknown or other
gaannnnttc

SEQ ID NO: 10 - DNA, 23 bp, Artificial Sequence
  source: /note="Description of Artificial Sequence: Synthetic oligonucleotide"
  modified_base (4)..(5): a, c, t, or g
  modified_base (12)..(17): a, c, t, or g
gacnnggtctcnnnnnngagacc

SEQ ID NO: 11 - DNA, 20 bp, Artificial Sequence
  source: /note="Description of Artificial Sequence: Synthetic oligonucleotide"
  modified_base (9)..(14): a, c, t, or g
gaagacgcnnnnnngtcttc

SEQ ID NO: 12 - DNA, 22 bp, Artificial Sequence
  source: /note="Description of Artificial Sequence: Synthetic oligonucleotide"
  modified_base (11)..(15): a, c, t, or g
gaagctcttcnnnnngaagagc

SEQ ID NO: 13 - DNA, 300046 bp, Artificial Sequence
  source: /note="Description of Artificial Sequence: Synthetic polynucleotide"
  modified_base (4)..(5): a, c, t, or g
  modified_base (12)..(17): a, c, t, or g
  modified_base (24)..(300023): a, c, t, or g
  misc_feature (24)..(300023): /note="This region may encompass 0-300000 nucleotides"
  modified_base (300030)..(300035): a, c, t, or g
  modified_base (300042)..(300043): a, c, t, or g
  source: /note="See specification as filed for detailed description of substitutions and preferred embodiments"
gacnnggtctcnnnnnngagaccnnnnnnnnnnnnnnnnnnnnnnnnnnnnnnnnnnnnnnnnnnnnnnnnnnnnnnnnnnnnnnnnnnnnnnnnnnnnnnnnnnnnnnnnnnnnnnnnnnnnnnnnnnnnnnnnnnnnnnnnnnnnnnnnnnnnnnnnnnnnnnnnnnnnnnnnnnnnnnnnnnnnnnnnnnnnnnnnnnnnnnnnnnnnnnnnnnnnnnnnnnnnnnnnnnnnnnnnnnnnnnnnnnnnnnnnnnnnnnnnnnnnnnnnnnnnnnnnnnnnnnnnnnnnnnnnnnnnnnnnnnnnnnnnnnnnnnnnnnnnnnnnnnnnnnnnnnnnnnnnnnnnnnnnnnnnnnnnnnnnnnnnnnnnnnnnnnnnnnnnnnnnnnnnnnnnnnnnnnnnnnnnnnnnnnnnnnnnnnnnnnnnnnnnnnnnnnnnnnnnnnnnnnnnnnnnnnnnnnnnnnnnnnnnnnnnnnnnnnnnnnnnnnnnnnnnnnnnnnnnnnnnnnnnnnnnnnnnnnnnnnnnnnnnnnnnnnnnnnnnnnnnnnnnnnnnnnnnnnnnnnnnnnnnnnnnnnnnnnnnnnnnnnnnnnnnnnnnnnnnnnnnnnnnnnnnnnnnnnnnnnnnnnnnnnnnnnnnnnnnnnnnnnnnnnnnnnnnnnnnnnnnnnnnnnnnnnnnnnnnnnnnnnnnnnnnnnnnnnnnnnnnnnnnnnnnnnnnnnnnnnnnnnnnnnnnnnnnnnnnnnnnnnnnnnnnnnnnnnnnnnnnnnnnnnnnnnnnnnnnnnnnnnnnnnnnnnnnnnnnnnnnnnnnnnnnnnnnnnnnnnnnnnnnnnnnnnnnnnnnnnnnnnnnnnnnnnnnnnnnnnnnnnnnnnnnnnnnnnnnnnnnnnnnnnnnnnnnnnnnnnnnnnnnnnnnnnnnnnnnnnnnnnnnnnnnnnnnnnnnnnnnnnnnnnnnnnnnnnnnnnnnnnnnnnnnnnnnnnnnnnnnnnnnnnnnnnnnnnnnnnnnnnnnnnnnnnnnnnnnnnnnnnnnnnnnnnnnnnnnnnnnnnnnnnnnnnnnnnnnnnnnnnnnnnnnnnnnnnnnnnnnnnnnnnnnnnnnnnnnnnnnnnnnnnnnnnnnnnnnnnnnnnnnnnnnnnnnnnnnnnnnnnnnnnnnnnnnnnnnnnnnnnnnnnnnnnnnnnnnnnnnnnnnnnnnnnnnnnnnnnnnnnnnnnnnnnnnnnnnnnnnnnnnnnnnnnnnnnnnnnnnnnnnnnnnnnnnnnnnnnnnnnnnnnnnnnnnnnnnnnnnnnnnnnnnnnnnnnnnnnnnnnnnnnnnnnnnnnnnnnnnnnnnnnnnnnnnnnnnnnnnnnnnnnnnnnnnnnnnnnnnnnnnnnnnnnnnnnnnnnnnnnnnnnnnnnnnnnnnnnnnnnnnnnnnnnnnnnnnnnnnnnnnnnnnnnnnnnnnnnnnnnnnnnnnnnnnnnnnnnnnnnnnnnnnnnnnnnnnnnnnnnnnnnnnnnnnnnnnnnnnnnnnnnnnnnnnnnnnnnnnnnnnnnnnnnnnnnnnnnnnnnnnnnnnnnnnnnnnnnnnnnnnnnnnnnnnnnnnnnnnnnnnnnnnnnnnnnnnnnnnnnnnnnnnnnnnnnnnnnnnnnnnnnnnnnnnnnnnnnnnnnnnnnnnnnnnnnnnnnnnnnnnnnnnnnnnnnnnnnnnnnnnnnnnnnnnnnnnnnnnnnnnnnnnnnnnnnnnnnnnnnnnnnnnnnnnnnnnnnnnnnnnnnnnnnnnnnnnnnnnnnnnnnnnnnnnnnnnnnnnnnnnnnnnnnnnnnnnnnnnnnnnnnnnnnnnnnnnnnnnnnnnnnnnnnnnnnnnnnnnnnnnnnnnnnnnnnnnnnnnnnnnnnnnnnnnnnnnnnnnnnnnnnnnnnnnnnnnnnnnnnnnnnnnnnnnnnnnnnnnnnnnnnnnnnnnnnnnnnnnnnnnnnnnnnnnnnnnnnnnnnnnnnnnnnnnnnnnnnnnnnnnnnnnnnnnnnnnnnnnnnnnnnnnnnnnnnnnnnnnnnnnnnnnnnnnnnnnnnnnnnnnnnnnnnnnnnnnnnnnnnnnnnnnnnnnnnnnnnnnnnnnnnnnnnnnnnnnnnnnnnnnnnnnnnnnnnnnnnnnnnnnnnnnnnnnnnnnnnnnnnnnnnnnnnnnnnnnnnnnnnnnnnnnnnnnnnnnnnnnnnnnnnnnnnnnnnnnnnnnnnnnnnnnnnnnnnnnnnnnnnnnnnnnnnnnnnnnnnnnnnnnnnnnnnnnnnnnnnnnnnnnnnnnnnnnnnnnnnnnnnnnnnnnnnnnnnnnnnnnnnnnnnnnnnnnnnnnnnnnnnnnnnnnnnnnnnnnnnnnnnnnnnnnnnnnnnnnnnnnnnnnnnnnnnnnnnnnnnnnnnnnnnnnnnnnnnnnnnnnnnnnnnnnnnnnnnnnnnnnnnnnnnnnnnnnnnnnnnnnnnnnnnnnnnnnnnnnnnnnnnnnnnnnnnnnnnnnnnnnnnnnnnnnnnnnnnnnnnnnnnnnnnnnnnnnnnnnnnnnnnnnnnnnnnnnnnnnnnnnnnnnnnnnnnnnnnnnnnnnnnnnnnnnnnnnnnnnnnnnnnnnnnnnnnnnnnnnnnnnnnnnnnnnnnnnnnnnnnnnnnnnnnnnnnnnnnnnnnnnnnnnnnnnnnnnnnnnnnnnnnnnnnnnnnnnnnnnnnnnnnnnnnnnnnnnnnnnnnnnnnnnnnnnnnnnnnnnnnnnnnnnnnnnnnnnnnnnnnnnnnnnnnnnnnnnnnnnnnnnnnnnnnnnnnnnnnnnnnnnnnnnnnnnnnnnnnnnnnnnnnnnnnnnnnnnnnnnnnnnnnnnnnnnnnnnnnnnnnnnnnnnnnnnnnnnnnnnnnnnnnnnnnnnnnnnnnnnnnnnnnnnnnnnnnnnnnnnnnnnnnnnnnnnnnnnnnnnnnnnnnnnnnnnnnnnnnnnnnnnnnnnnnnnnnnnnnnnnnnnnnnnnnnnnnnnnnnnnnnnnnnnnnnnnnnnnnnnnnnnnnnnnnnnnnnnnnnnnnnnnnnnnnnnnnnnnnnnnnnnnnnnnnnnnnnnnnnnnnnnnnnnnnnnnnnnnnnnnnnnnnnnnnnnnnnnnnnnnnnnnnnnnnnnnnnnnnnnnnnnnnnnnnnnnnnnnnnnnnnnnnnnnnnnnnnnnnnnnnnnnnnnnnnnnnnnnnnnnnnnnnnnnnnnnnnnnnnnnnnnnnnnnnnnnnnnnnnnnnnnnnnnnnnnnnnnnnnnnnnnnnnnnnnnnnnnnnnnnnnnnnnnnnnnnnnnnnnnnnnnnnnnnnnnnnnnnnnnnnnnnnnnnnnnnnnnnnnnnnnnnnnnnnnnnnnnnnnnnnnnnnnnnnnnnnnnnnnnnnnnnnnnnnnnnnnnnnnnnnnnnnnnnnnnnnnnnnnnnnnnnnnnnnnnnnnnnnnnnnnnnnnnnnnnnnnnnnnnnnnnnnnnnnnnnnnnnnnnnnnnnnnnnnnnnnnnnnnnnnnnnnnnnnnnnnnnnnnnnnnnnnnnnnnnnnnnnnnnnnnnnnnnnnnnnnnnnnnnnnnnnnnnnnnnnnnnnnnnnnnnnnnnnnnnnnnnnnnnnnnnnnnnnnnnnnnnnnnnnnnnnnnnnnnnnnnnnnnnnnnnnnnnnnnnnnnnnnnnnnnnnnnnnnnnnnnnnnnnnnnnnnnnnnnnnnnnnnnnnnnnnnnnnnnnnnnnnnnnnnnnnnnnnnnnnnnnnnnnnnnnnnnnnnnnnnnnnnnnnnnnnnnnnnnnnnnnnnnnnnnnnnnnnnnnnnnnnnnnnnnnnnnnnnnnnnnnnnnnnnnnnnnnnnnnnnnnnnnnnnnnnnnnnnnnnnnnnnnnnnnnnnnnnnnnnnnnnnnnnnnnnnnnnnnnnnnnnnnnnnnnnnnnnnnnnnnnnnnnnnnnnnnnnnnnnnnnnnnnnnnnnnnnnnnnnnnnnnnnnnnnnnnnnnnnnnnnnnnnnnnnnnnnnnnnnnnnnnnnnnnnnnnnnnnnnnnnnnnnnnnnnnnnnnnnnnnnnnnnnnnnnnnnnnnnnnnnnnnnnnnnnnnnnnnnnnnnnnnnnnnnnnnnnnnnnnnnnnnnnnnnnnnnnnnnnnnnnnnnnnnnnnnnnnnnnnnnnnnnnnnnnnnnnnnnnnnnnnnnnnnnnnnnnnnnnnnnnnnnnnnnnnnnnnnnnnnnnnnnnnnnnnnnnnnnnnnnnnnnnnnnnnnnnnnnnnnnnnnnnnnnnnnnnnnnnnnnnnnnnnnnnnnnnnnnnnnnnnnnnnnnnnnnnnnnnnnnnnnnnnnnnnnnnnnnnnnnnnnnnnnnnnnnnnnnnnnnnnnnnnnnnnnnnnnnnnnnnnnnnnnnnnnnnnnnnnnnnnnnnnnnnnnnnnnnnnnnnnnnnnnnnnnnnnnnnnnnnnnnnnnnnnnnnnnnnnnnnnnnnnnnnnnnnnnnnnnnnnnnnnnnnnnnnnnnnnnnnnnnnnnnnnnnnnnnnnnnnnnnnnnnnnnnnnnnnnnnnnnnnnnnnnnnnnnnnnnnnnnnnnnnnnnnnnnnnnnnnnnnnnnnnnnnnnnnnnnnnnnnnnnnnnnnnnnnnnnnnnnnnnnnnnnnnnnnnnnnnnnnnnnnnnnnnnnnnnnnnnnnnnnnnnnnnnnnnnnnnnnnnnnnnnnnnnnnnnnnnnnnnnnnnnnnnnnnnnnnnnnnnnnnnnnnnnnnnnnnnnnnnnnnnnnnnnnnnnnnnnnnnnnnnnnnnnnnnnnnnnnnnnnnnnnnnnnnnnnnnnnnnnnnnnnnnnnnnnnnnnnnnnnnnnnnnnnnnnnnnnnnnnnnnnnnnnnnnnnnnnnnnnnnnnnnnnnnnnnnnnnnnnnnnnnnnnnnnnnnnnnnnnnnnnnnnnnnnnnnnnnnnnnnnnnnnnnnnnnnnnnnnnnnnnnnnnnnnnnnnnnnnnnnnnnnnnnnnnnnnnnnnnnnnnnnnnnnnnnnnnnnnnnnnnnnnnnnnnnnnnnnnnnnnnnnnnnnnnnnnnnnnnnnnnnnnnnnnnnnnnnnnnnnnnnnnnnnnnnnnnnnnnnnnnnnnnnnnnnnnnnnnnnnnnnnnnnnnnnnnnnnnnnnnnnnnnnnnnnnnnnnnnnnnnnnnnnnnnnnnnnnnnnnnnnnnnnnnnnnnnnnnnnnnnnnnnnnnnnnnnnnnnnnnnnnnnnnnnnnnnnnnnnnnnnnnnnnnnnnnnnnnnnnnnnnnnnnnnnnnnnnnnnnnnnnnnnnnnnnnnnnnnnnnnnnnnnnnnnnnnnnnnnnnnnnnnnnnnnnnnnnnnnnnnnnnnnnnnnnnnnnnnnnnnnnnnnnnnnnnnnnnnnnnnnnnnnnnnnnnnnnnnnnnnnnnnnnnnnnnnnnnnnnnnnnnnnnnnnnnnnnnnnnnnnnnnnnnnnnnnnnnnnnnnnnnnnnnnnnnnnnnnnnnnnnnnnnnnnnnnnnnnnnnnnnnnnnnnnnnnnnnnnnnnnnnnnnnnnnnnnnnnnnnnnnnnnnnnnnnnnnnnnnnnnnnnnnnnnnnnnnnnnnnnnnnnnnnnnnnnnnnnnnnnnnnnnnnnnnnnnnnnnnnnnnnnnnnnnnnnnnnnnnnnnnnnnnnnnnnnnnnnnnnnnnnnnnnnnnnnnnnnnnnnnnnnnnnnnnnnnnnnnnnnnnnnnnnnnnnnnnnnnnnnnnnnnnnnnnnnnnnnnnnnnnnnnnnnnnnnnnnnnnnnnnnnnnnnnnnnnnnnnnnnnnnnnnnnnnnnnnnnnnnnnnnnnnnnnnnnnnnnnnnnnnnnnnnnnnnnnnnnnnnnnnnnnnnnnnnnnnnnnnnnnnnnnnnnnnnnnnnnnnnnnnnnnnnnnnnnnnnnnnnnnnnnnnnnnnnnnnnnnnnnnnnnnnnnnnnnnnnnnnnnnnnnnnnnnnnnnnnnnnnnnnnnnnnnnnnnnnnnnnnnnnnnnnnnnnnnnnnnnnnnnnnnnnnnnnnnnnnnnnnnnnnnnnnnnnnnnnnnnnnnnnnnnnnnnnnnnnnnnnnnnnnnnnnnnnnnnnnnnnnnnnnnnnnnnnnnnnnnnnnnnnnnnnnnnnnnnnnnnnnnnnnnnnnnnnnnnnnnnnnnnnnnnnnnnnnnnnnnnnnnnnnnnnnnnnnnnnnnnnnnnnnnnnnnnnnnnnnnnnnnnnnnnnnnnnnnnnnnnnnnnnnnnnnnnnnnnnnnnnnnnnnnnnnnnnnnnnnnnnnnnnnnnnnnnnnnnnnnnnnnnnnnnnnnnnnnnnnnnnnnnnnnnnnnnnnnnnnnnnnnnnnnnnnnnnnnnnnnnnnnnnnnnnnnnnnnnnnnnnnnnnnnnnnnnnnnnnnnnnnnnnnnnnnnnnnnnnnnnnnnnnnnnnnnnnnnnnnnnnnnnnnnnnnnnnnnnnnnnnnnnnnnnnnnnnnnnnnnnnnnnnnnnnnnnnnnnnnnnnnnnnnnnnnnnnnnnnnnnnnnnnnnnnnnnnnnnnnnnnnnnnnnnnnnnnnnnnnnnnnnnnnnnnnnnnnnnnnnnnnnnnnnnnnnnnnnnnnnnnnnnnnnnnnnnnnnnnnnnnnnnnnnnnnnnnnnnnnnnnnnnnnnnnnnnnnnnnnnnnnnnnnnnnnnnnnnnnnnnnnnnnnnnnnnnnnnnnnnnnnnnnnnnnnnnnnnnnnnnnnnnnnnnnnnnnnnnnnnnnnnnnnnnnnnnnnnnnnnnnnnnnnnnnnnnnnnnnnnnnnnnnnnnnnnnnnnnnnnnnnnnnnnnnnnnnnnnnnnnnnnnnnnnnnnnnnnnnnnnnnnnnnnnnnnnnnnnnnnnnnnnnnnnnnnnnnnnnnnnnnnnnnnnnnnnnnnnnnnnnnnnnnnnnnnnnnnnnnnnnnnnnnnnnnnnnnnnnnnnnnnnnnnnnnnnnnnnnnnnnnnnnnnnnnnnnnnnnnnnnnnnnnnnnnnnnnnnnnnnnnnnnnnnnnnnnnnnnnnnnnnnnnnnnnnnnnnnnnnnnnnnnnnnnnnnnnnnnnnnnnnnnnnnnnnnnnnnnnnnnnnnnnnnnnnnnnnnnnnnnnnnnnnnnnnnnnnnnnnnnnnnnnnnnnnnnnnnnnnnnnnnnnnnnnnnnnnnnnnnnnnnnnnnnnnnnnnnnnnnnnnnnnnnnnnnnnnnnnnnnnnnnnnnnnnnnnnnnnnnnnnnnnnnnnnnnnnnnnnnnnnnnnnnnnnnnnnnnnnnnnnnnnnnnnnnnnnnnnnnnnnnnnnnnnnnnnnnnnnnnnnnnnnnnnnnnnnnnnnnnnnnnnnnnnnnnnnnnnnnnnnnnnnnnnnnnnnnnnnnnnnnnnnnnnnnnnnnnnnnnnnnnnnnnnnnnnnnnnnnnnnnnnnnnnnnnnnnnnnnnnnnnnnnnnnnnnnnnnnnnnnnnnnnnnnnnnnnnnnnnnnnnnnnnnnnnnnnnnnnnnnnnnnnnnnnnnnnnnnnnnnnnnnnnnnnnnnnnnnnnnnnnnnnnnnnnnnnnnnnnnnnnnnnnnnnnnnnnnnnnnnnnnnnnnnnnnnnnnnnnnnnnnnnnnnnnnnnnnnnnnnnnnnnnnnnnnnnnnnnnnnnnnnnnnnnnnnnnnnnnnnnnnnnnnnnnnnnnnnnnnnnnnnnnnnnnnnnnnnnnnnnnnnnnnnnnnnnnnnnnnnnnnnnnnnnnnnnnnnnnnnnnnnnnnnnnnnnnnnnnnnnnnnnnnnnnnnnnnnnnnnnnnnnnnnnnnnnnnnnnnnnnnnnnnnnnnnnnnnnnnnnnnnnnnnnnnnnnnnnnnnnnnnnnnnnnnnnnnnnnnnnnnnnnnnnnnnnnnnnnnnnnnnnnnnnnnnnnnnnnnnnnnnnnnnnnnnnnnnnnnnnnnnnnnnnnnnnnnnnnnnnnnnnnnnnnnnnnnnnnnnnnnnnnnnnnnnnnnnnnnnnnnnnnnnnnnnnnnnnnnnnnnnnnnnnnnnnnnnnnnnnnnnnnnnnnnnnnnnnnnnnnnnnnnnnnnnnnnnnnnnnnnnnnnnnnnnnnnnnnnnnnnnnnnnnnnnnnnnnnnnnnnnnnnnnnnnnnnnnnnnnnnnnnnnnnnnnnnnnnnnnnnnnnnnnnnnnnnnnnnnnnnnnnnnnnnnnnnnnnnnnnnnnnnnnnnnnnnnnnnnnnnnnnnnnnnnnnnnnnnnnnnnnnnnnnnnnnnnnnnnnnnnnnnnnnnnnnnnnnnnnnnnnnnnnnnnnnnnnnnnnnnnnnnnnnnnnnnnnnnnnnnnnnnnnnnnnnnnnnnnnnnnnnnnnnnnnnnnnnnnnnnnnnnnnnnnnnnnnnnnnnnnnnnnnnnnnnnnnnnnnnnnnnnnnnnnnnnnnnnnnnnnnnnnnnnnnnnnnnnnnnnnnnnnnnnnnnnnnnnnnnnnnnnnnnnnnnnnnnnnnnnnnnnnnnnnnnnnnnnnnnnnnnnnnnnnnnnnnnnnnnnnnnnnnnnnnnnnnnnnnnnnnnnnnnnnnnnnnnnnnnnnnnnnnnnnnnnnnnnnnnnnnnnnnnnnnnnnnnnnnnnnnnnnnnnnnnnnnnnnnnnnnnnnnnnnnnnnnnnnnnnnnnnnnnnnnnnnnnnnnnnnnnnnnnnnnnnnnnnnnnnnnnnnnnnnnnnnnnnnnnnnnnnnnnnnnnnnnnnnnnnnnnnnnnnnnnnnnnnnnnnnnnnnnnnnnnnnnnnnnnnnnnnnnnnnnnnnnnnnnnnnnnnnnnnnnnnnnnnnnnnnnnnnnnnnnnnnnnnnnnnnnnnnnnnnnnnnnnnnnnnnnnnnnnnnnnnnnnnnnnnnnnnnnnnnnnnnnnnnnnnnnnnnnnnnnnnnnnnnnnnnnnnnnnnnnnnnnnnnnnnnnnnnnnnnnnnnnnnnnnnnnnnnnnnnnnnnnnnnnnnnnnnnnnnnnnnnnnnnnnnnnnnnnnnnnnnnnnnnnnnnnnnnnnnnnnnnnnnnnnnnnnnnnnnnnnnnnnnnnnnnnnnnnnnnnnnnnnnnnnnnnnnnnnnnnnnnnnnnnnnnnnnnnnnnnnnnnnnnnnnnnnnnnnnnnnnnnnnnnnnnnnnnnnnnnnnnnnnnnnnnnnnnnnnnnnnnnnnnnnnnnnnnnnnnnnnnnnnnnnnnnnnnnnnnnnnnnnnnnnnnnnnnnnnnnnnnnnnnnnnnnnnnnnnnnnnnnnnnnnnnnnnnnnnnnnnnnnnnnnnnnnnnnnnnnnnnnnnnnnnnnnnnnnnnnnnnnnnnnnnnnnnnnnnnnnnnnnnnnnnnnnnnnnnnnnnnnnnnnnnnnnnnnnnnnnnnnnnnnnnnnnnnnnnnnnnnnnnnnnnnnnnnnnnnnnnnnnnnnnnnnnnnnnnnnnnnnnnnnnnnnnnnnnnnnnnnnnnnnnnnnnnnnnnnnnnnnnnnnnnnnnnnnnnnnnnnnnnnnnnnnnnnnnnnnnnnnnnnnnnnnnnnnnnnnnnnnnnnnnnnnnnnnnnnnnnnnnnnnnnnnnnnnnnnnnnnnnnnnnnnnnnnnnnnnnnnnnnnnnnnnnnnnnnnnnnnnnnnnnnnnnnnnnnnnnnnnnnnnnnnnnnnnnnnnnnnnnnnnnnnnnnnnnnnnnnnnnnnnnnnnnnnnnnnnnnnnnnnnnnnnnnnnnnnnnnnnnnnnnnnnnnnnnnnnnnnnnnnnnnnnnnnnnnnnnnnnnnnnnnnnnnnnnnnnnnnnnnnnnnnnnnnnnnnnnnnnnnnnnnnnnnnnnnnnnnnnnnnnnnnnnnnnnnnnnnnnnnnnnnnnnnnnnnnnnnnnnnnnnnnnnnnnnnnnnnnnnnnnnnnnnnnnnnnnnnnnnnnnnnnnnnnnnnnnnnnnnnnnnnnnnnnnnnnnnnnnnnnnnnnnnnnnnnnnnnnnnnnnnnnnnnnnnnnnnnnnnnnnnnnnnnnnnnnnnnnnnnnnnnnnnnnnnnnnnnnnnnnnnnnnnnnnnnnnnnnnnnnnnnnnnnnnnnnnnnnnnnnnnnnnnnnnnnnnnnnnnnnnnnnnnnnnnnnnnnnnnnnnnnnnnnnnnnnnnnnnnnnnnnnnnnnnnnnnnnnnnnnnnnnnnnnnnnnnnnnnnnnnnnnnnnnnnnnnnnnnnnnnnnnnnnnnnnnnnnnnnnnnnnnnnnnnnnnnnnnnnnnnnnnnnnnnnnnnnnnnnnnnnnnnnnnnnnnnnnnnnnnnnnnnnnnnnnnnnnnnnnnnnnnnnnnnnnnnnnnnnnnnnnnnnnnnnnnnnnnnnnnnnnnnnnnnnnnnnnnnnnnnnnnnnnnnnnnnnnnnnnnnnnnnnnnnnnnnnnnnnnnnnnnnnnnnnnnnnnnnnnnnnnnnnnnnnnnnnnnnnnnnnnnnnnnnnnnnnnnnnnnnnnnnnnnnnnnnnnnnnnnnnnnnnnnnnnnnnnnnnnnnnnnnnnnnnnnnnnnnnnnnnnnnnnnnnnnnnnnnnnnnnnnnnnnnnnnnnnnnnnnnnnnnnnnnnnnnnnnnnnnnnnnnnnnnnnnnnnnnnnnnnnnnnnnnnnnnnnnnnnnnnnnnnnnnnnnnnnnnnnnnnnnnnnnnnnnnnnnnnnnnnnnnnnnnnnnnnnnnnnnnnnnnnnnnnnnnnnnnnnnnnnnnnnnnnnnnnnnnnnnnnnnnnnnnnnnnnnnnnnnnnnnnnnnnnnnnnnnnnnnnnnnnnnnnnnnnnnnnnnnnnnnnnnnnnnnnnnnnnnnnnnnnnnnnnnnnnnnnnnnnnnnnnnnnnnnnnnnnnnnnnnnnnnnnnnnnnnnnnnnnnnnnnnnnnnnnnnnnnnnnnnnnnnnnnnnnnnnnnnnnnnnnnnnnnnnnnnnnnnnnnnnnnnnnnnnnnnnnnnnnnnnnnnnnnnnnnnnnnnnnnnnnnnnnnnnnnnnnnnnnnnnnnnnnnnnnnnnnnnnnnnnnnnnnnnnnnnnnnnnnnnnnnnnnnnnnnnnnnnnnnnnnnnnnnnnnnnnnnnnnnnnnnnnnnnnnnnnnnnnnnnnnnnnnnnnnnnnnnnnnnnnnnnnnnnnnnnnnnnnnnnnnnnnnnnnnnnnnnnnnnnnnnnnnnnnnnnnnnnnnnnnnnnnnnnnnnnnnnnnnnnnnnnnnnnnnnnnnnnnnnnnnnnnnnnnnnnnnnnnnnnnnnnnnnnnnnnnnnnnnnnnnnnnnnnnnnnnnnnnnnnnnnnnnnnnnnnnnnnnnnnnnnnnnnnnnnnnnnnnnnnnnnnnnnnnnnnnnnnnnnnnnnnnnnnnnnnnnnnnnnnnnnnnnnnnnnnnnnnnnnnnnnnnnnnnnnnnnnnnnnnnnnnnnnnnnnnnnnnnnnnnnnnnnnnnnnnnnnnnnnnnnnnnnnnnnnnnnnnnnnnnnnnnnnnnnnnnnnnnnnnnnnnnnnnnnnnnnnnnnnnnnnnnnnnnnnnnnnnnnnnnnnnnnnnnnnnnnnnnnnnnnnnnnnnnnnnnnnnnnnnnnnnnnnnnnnnnnnnnnnnnnnnnnnnnnnnnnnnnnnnnnnnnnnnnnnnnnnnnnnnnnnnnnnnnnnnnnnnnnnnnnnnnnnnnnnnnnnnnnnnnnnnnnnnnnnnnnnnnnnnnnnnnnnnnnnnnnnnnnnnnnnnnnnnnnnnnnnnnnnnnnnnnnnnnnnnnnnnnnnnnnnnnnnnnnnnnnnnnnnnnnnnnnnnnnnnnnnnnnnnnnnnnnnnnnnnnnnnnnnnnnnnnnnnnnnnnnnnnnnnnnnnnnnnnnnnnnnnnnnnnnnnnnnnnnnnnnnnnnnnnnnnnnnnnnnnnnnnnnnnnnnnnnnnnnnnnnnnnnnnnnnnnnnnnnnnnnnnnnnnnnnnnnnnnnnnnnnnnnnnnnnnnnnnnnnnnnnnnnnnnnnnnnnnnnnnnnnnnnnnnnnnnnnnnnnnnnnnnnnnnnnnnnnnnnnnnnnnnnnnnnnnnnnnnnnnnnnnnnnnnnnnnnnnnnnnnnnnnnnnnnnnnnnnnnnnnnnnnnnnnnnnnnnnnnnnnnnnnnnnnnnnnnnnnnnnnnnnnnnnnnnnnnnnnnnnnnnnnnnnnnnnnnnnnnnnnnnnnnnnnnnnnnnnnnnnnnnnnnnnnnnnnnnnnnnnnnnnnnnnnnnnnnnnnnnnnnnnnnnnnnnnnnnnnnnnnnnnnnnnnnnnnnnnnnnnnnnnnnnnnnnnnnnnnnnnnnnnnnnnnnnnnnnnnnnnnnnnnnnnnnnnnnnnnnnnnnnnnnnnnnnnnnnnnnnnnnnnnnnnnnnnnnnnnnnnnnnnnnnnnnnnnnnnnnnnnnnnnnnnnnnnnnnnnnnnnnnnnnnnnnnnnnnnnnnnnnnnnnnnnnnnnnnnnnnnnnnnnnnnnnnnnnnnnnnnnnnnnnnnnnnnnnnnnnnnnnnnnnnnnnnnnnnnnnnnnnnnnnnnnnnnnnnnnnnnnnnnnnnnnnnnnnnnnnnnnnnnnnnnnnnnnnnnnnnnnnnnnnnnnnnnnnnnnnnnnnnnnnnnnnnnnnnnnnnnnnnnnnnnnnnnnnnnnnnnnnnnnnnnnnnnnnnnnnnnnnnnnnnnnnnnnnnnnnnnnnnnnnnnnnnnnnnnnnnnnnnnnnnnnnnnnnnnnnnnnnnnnnnnnnnnnnnnnnnnnnnnnnnnnnnnnnnnnnnnnnnnnnnnnnnnnnnnnnnnnnnnnnnnnnnnnnnnnnnnnnnnnnnnnnnnnnnnnnnnnnnnnnnnnnnnnnnnnnnnnnnnnnnnnnnnnnnnnnnnnnnnnnnnnnnnnnnnnnnnnnnnnnnnnnnnnnnnnnnnnnnnnnnnnnnnnnnnnnnnnnnnnnnnnnnnnnnnnnnnnnnnnnnnnnnnnnnnnnnnnnnnnnnnnnnnnnnnnnnnnnnnnnnnnnnnnnnnnnnnnnnnnnnnnnnnnnnnnnnnnnnnnnnnnnnnnnnnnnnnnnnnnnnnnnnnnnnnnnnnnnnnnnnnnnnnnnnnnnnnnnnnnnnnnnnnnnnnnnnnnnnnnnnnnnnnnnnnnnnnnnnnnnnnnnnnnnnnnnnnnnnnnnnnnnnnnnnnnnnnnnnnnnnnnnnnnnnnnnnnnnnnnnnnnnnnnnnnnnnnnnnnnnnnnnnnnnnnnnnnnnnnnnnnnnnnnnnnnnnnnnnnnnnnnnnnnnnnnnnnnnnnnnnnnnnnnnnnnnnnnnnnnnnnnnnnnnnnnnnnnnnnnnnnnnnnnnnnnnnnnnnnnnnnnnnnnnnnnnnnnnnnnnnnnnnnnnnnnnnnnnnnnnnnnnnnnnnnnnnnnnnnnnnnnnnnnnnnnnnnnnnnnnnnnnnnnnnnnnnnnnnnnnnnnnnnnnnnnnnnnnnnnnnnnnnnnnnnnnnnnnnnnnnnnnnnnnnnnnnnnnnnnnnnnnnnnnnnnnnnnnnnnnnnnnnnnnnnnnnnnnnnnnnnnnnnnnnnnnnnnnnnnnnnnnnnnnnnnnnnnnnnnnnnnnnnnnnnnnnnnnnnnnnnnnnnnnnnnnnnnnnnnnnnnnnnnnnnnnnnnnnnnnnnnnnnnnnnnnnnnnnnnnnnnnnnnnnnnnnnnnnnnnnnnnnnnnnnnnnnnnnnnnnnnnnnnnnnnnnnnnnnnnnnnnnnnnnnnnnnnnnnnnnnnnnnnnnnnnnnnnnnnnnnnnnnnnnnnnnnnnnnnnnnnnnnnnnnnnnnnnnnnnnnnnnnnnnnnnnnnnnnnnnnnnnnnnnnnnnnnnnnnnnnnnnnnnnnnnnnnnnnnnnnnnnnnnnnnnnnnnnnnnnnnnnnnnnnnnnnnnnnnnnnnnnnnnnnnnnnnnnnnnnnnnnnnnnnnnnnnnnnnnnnnnnnnnnnnnnnnnnnnnnnnnnnnnnnnnnnnnnnnnnnnnnnnnnnnnnnnnnnnnnnnnnnnnnnnnnnnnnnnnnnnnnnnnnnnnnnnnnnnnnnnnnnnnnnnnnnnnnnnnnnnnnnnnnnnnnnnnnnnnnnnnnnnnnnnnnnnnnnnnnnnnnnnnnnnnnnnnnnnnnnnnnnnnnnnnnnnnnnnnnnnnnnnnnnnnnnnnnnnnnnnnnnnnnnnnnnnnnnnnnnnnnnnnnnnnnnnnnnnnnnnnnnnnnnnnnnnnnnnnnnnnnnnnnnnnnnnnnnnnnnnnnnnnnnnnnnnnnnnnnnnnnnnnnnnnnnnnnnnnnnnnnnnnnnnnnnnnnnnnnnnnnnnnnnnnnnnnnnnnnnnnnnnnnnnnnnnnnnnnnnnnnnnnnnnnnnnnnnnnnnnnnnnnnnnnnnnnnnnnnnnnnnnnnnnnnnnnnnnnnnnnnnnnnnnnnnnnnnnnnnnnnnnnnnnnnnnnnnnnnnnnnnnnnnnnnnnnnnnnnnnnnnnnnnnnnnnnnnnnnnnnnnnnnnnnnnnnnnnnnnnnnnnnnnnnnnnnnnnnnnnnnnnnnnnnnnnnnnnnnnnnnnnnnnnnnnnnnnnnnnnnnnnnnnnnnnnnnnnnnnnnnnnnnnnnnnnnnnnnnnnnnnnnnnnnnnnnnnnnnnnnnnnnnnnnnnnnnnnnnnnnnnnnnnnnnnnnnnnnnnnnnnnnnnnnnnnnnnnnnnnnnnnnnnnnnnnnnnnnnnnnnnnnnnnnnnnnnnnnnnnnnnnnnnnnnnnnnnnnnnnnnnnnnnnnnnnnnnnnnnnnnnnnnnnnnnnnnnnnnnnnnnnnnnnnnnnnnnnnnnnnnnnnnnnnnnnnnnnnnnnnnnnnnnnnnnnnnnnnnnnnnnnnnnnnnnnnnnnnnnnnnnnnnnnnnnnnnnnnnnnnnnnnnnnnnnnnnnnnnnnnnnnnnnnnnnnnnnnnnnnnnnnnnnnnnnnnnnnnnnnnnnnnnnnnnnnnnnnnnnnnnnnnnnnnnnnnnnnnnnnnnnnnnnnnnnnnnnnnnnnnnnnnnnnnnnnnnnnnnnnnnnnnnnnnnnnnnnnnnnnnnnnnnnnnnnnnnnnnnnnnnnnnnnnnnnnnnnnnnnnnnnnnnnnnnnnnnnnnnnnnnnnnnnnnnnnnnnnnnnnnnnnnnnnnnnnnnnnnnnnnnnnnnnnnnnnnnnnnnnnnnnnnnnnnnnnnnnnnnnnnnnnnnnnnnnnnnnnnnnnnnnnnnnnnnnnnnnnnnnnnnnnnnnnnnnnnnnnnnnnnnnnnnnnnnnnnnnnnnnnnnnnnnnnnnnnnnnnnnnnnnnnnnnnnnnnnnnnnnnnnnnnnnnnnnnnnnnnnnnnnnnnnnnnnnnnnnnnnnnnnnnnnnnnnnnnnnnnnnnnnnnnnnnnnnnnnnnnnnnnnnnnnnnnnnnnnnnnnnnnnnnnnnnnnnnnnnnnnnnnnnnnnnnnnnnnnnnnnnnnnnnnnnnnnnnnnnnnnnnnnnnnnnnnnnnnnnnnnnnnnnnnnnnnnnnnnnnnnnnnnnnnnnnnnnnnnnnnnnnnnnnnnnnnnnnnnnnnnnnnnnnnnnnnnnnnnnnnnnnnnnnnnnnnnnnnnnnnnnnnnnnnnnnnnnnnnnnnnnnnnnnnnnnnnnnnnnnnnnnnnnnnnnnnnnnnnnnnnnnnnnnnnnnnnnnnnnnnnnnnnnnnnnnnnnnnnnnnnnnnnnnnnnnnnnnnnnnnnnnnnnnnnnnnnnnnnnnnnnnnnnnnnnnnnnnnnnnnnnnnnnnnnnnnnnnnnnnnnnnnnnnnnnnnnnnnnnnnnnnnnnnnnnnnnnnnnnnnnnnnnnnnnnnnnnnnnnnnnnnnnnnnnnnnnnnnnnnnnnnnnnnnnnnnnnnnnnnnnnnnnnnnnnnnnnnnnnnnnnnnnnnnnnnnnnnnnnnnnnnnnnnnnnnnnnnnnnnnnnnnnnnnnnnnnnnnnnnnnnnnnnnnnnnnnnnnnnnnnnnnnnnnnnnnnnnnnnnnnnnnnnnnnnnnnnnnnnnnnnnnnnnnnnnnnnnnnnnnnnnnnnnnnnnnnnnnnnnnnnnnnnnnnnnnnnnnnnnnnnnnnnnnnnnnnnnnnnnnnnnnnnnnnnnnnnnnnnnnnnnnnnnnnnnnnnnnnnnnnnnnnnnnnnnnnnnnnnnnnnnnnnnnnnnnnnnnnnnnnnnnnnnnnnnnnnnnnnnnnnnnnnnnnnnnnnnnnnnnnnnnnnnnnnnnnnnnnnnnnnnnnnnnnnnnnnnnnnnnnnnnnnnnnnnnnnnnnnnnnnnnnnnnnnnnnnnnnnnnnnnnnnnnnnnnnnnnnnnnnnnnnnnnnnnnnnnnnnnnnnnnnnnnnnnnnnnnnnnnnnnnnnnnnnnnnnnnnnnnnnnnnnnnnnnnnnnnnnnnnnnnnnnnnnnnnnnnnnnnnnnnnnnnnnnnnnnnnnnnnnnnnnnnnnnnnnnnnnnnnnnnnnnnnnnnnnnnnnnnnnnnnnnnnnnnnnnnnnnnnnnnnnnnnnnnnnnnnnnnnnnnnnnnnnnnnnnnnnnnnnnnnnnnnnnnnnnnnnnnnnnnnnnnnnnnnnnnnnnnnnnnnnnnnnnnnnnnnnnnnnnnnnnnnnnnnnnnnnnnnnnnnnnnnnnnnnnnnnnnnnnnnnnnnnnnnnnnnnnnnnnnnnnnnnnnnnnnnnnnnnnnnnnnnnnnnnnnnnnnnnnnnnnnnnnnnnnnnnnnnnnnnnnnnnnnnnnnnnnnnnnnnnnnnnnnnnnnnnnnnnnnnnnnnnnnnnnnnnnnnnnnnnnnnnnnnnnnnnnnnnnnnnnnnnnnnnnnnnnnnnnnnnnnnnnnnnnnnnnnnnnnnnnnnnnnnnnnnnnnnnnnnnnnnnnnnnnnnnnnnnnnnnnnnnnnnnnnnnnnnnnnnnnnnnnnnnnnnnnnnnnnnnnnnnnnnnnnnnnnnnnnnnnnnnnnnnnnnnnnnnnnnnnnnnnnnnnnnnnnnnnnnnnnnnnnnnnnnnnnnnnnnnnnnnnnnnnnnnnnnnnnnnnnnnnnnnnnnnnnnnnnnnnnnnnnnnnnnnnnnnnnnnnnnnnnnnnnnnnnnnnnnnnnnnnnnnnnnnnnnnnnnnnnnnnnnnnnnnnnnnnnnnnnnnnnnnnnnnnnnnnnnnnnnnnnnnnnnnnnnnnnnnnnnnnnnnnnnnnnnnnnnnnnnnnnnnnnnnnnnnnnnnnnnnnnnnnnnnnnnnnnnnnnnnnnnnnnnnnnnnnnnnnnnnnnnnnnnnnnnnnnnnnnnnnnnnnnnnnnnnnnnnnnnnnnnnnnnnnnnnnnnnnnnnnnnnnnnnnnnnnnnnnnnnnnnnnnnnnnnnnnnnnnnnnnnnnnnnnnnnnnnnnnnnnnnnnnnnnnnnnnnnnnnnnnnnnnnnnnnnnnnnnnnnnnnnnnnnnnnnnnnnnnnnnnnnnnnnnnnnnnnnnnnnnnnnnnnnnnnnnnnnnnnnnnnnnnnnnnnnnnnnnnnnnnnnnnnnnnnnnnnnnnnnnnnnnnnnnnnnnnnnnnnnnnnnnnnnnnnnnnnnnnnnnnnnnnnnnnnnnnnnnnnnnnnnnnnnnnnnnnnnnnnnnnnnnnnnnnnnnnnnnnnnnnnnnnnnnnnnnnnnnnnnnnnnnnnnnnnnnnnnnnnnnnnnnnnnnnnnnnnnnnnnnnnnnnnnnnnnnnnnnnnnnnnnnnnnnnnnnnnnnnnnnnnnnnnnnnnnnnnnnnnnnnnnnnnnnnnnnnnnnnnnnnnnnnnnnnnnnnnnnnnnnnnnnnnnnnnnnnnnnnnnnnnnnnnnnnnnnnnnnnnnnnnnnnnnnnnnnnnnnnnnnnnnnnnnnnnnnnnnnnnnnnnnnnnnnnnnnnnnnnnnnnnnnnnnnnnnnnnnnnnnnnnnnnnnnnnnnnnnnnnnnnnnnnnnnnnnnnnnnnnnnnnnnnnnnnnnnnnnnnnnnnnnnnnnnnnnnnnnnnnnnnnnnnnnnnnnnnnnnnnnnnnnnnnnnnnnnnnnnnnnnnnnnnnnnnnnnnnnnnnnnnnnnnnnnnnnnnnnnnnnnnnnnnnnnnnnnnnnnnnnnnnnnnnnnnnnnnnnnnnnnnnnnnnnnnnnnnnnnnnnnnnnnnnnnnnnnnnnnnnnnnnnnnnnnnnnnnnnnnnnnnnnnnnnnnnnnnnnnnnnnnnnnnnnnnnnnnnnnnnnnnnnnnnnnnnnnnnnnnnnnnnnnnnnnnnnnnnnnnnnnnnnnnnnnnnnnnnnnnnnnnnnnnnnnnnnnnnnnnnnnnnnnnnnnnnnnnnnnnnnnnnnnnnnnnnnnnnnnnnnnnnnnnnnnnnnnnnnnnnnnnnnnnnnnnnnnnnnnnnnnnnnnnnnnnnnnnnnnnnnnnnnnnnnnnnnnnnnnnnnnnnnnnnnnnnnnnnnnnnnnnnnnnnnnnnnnnnnnnnnnnnnnnnnnnnnnnnnnnnnnnnnnnnnnnnnnnnnnnnnnnnnnnnnnnnnnnnnnnnnnnnnnnnnnnnnnnnnnnnnnnnnnnnnnnnnnnnnnnnnnnnnnnnnnnnnnnnnnnnnnnnnnnnnnnnnnnnnnnnnnnnnnnnnnnnnnnnnnnnnnnnnnnnnnnnnnnnnnnnnnnnnnnnnnnnnnnnnnnnnnnnnnnnnnnnnnnnnnnnnnnnnnnnnnnnnnnnnnnnnnnnnnnnnnnnnnnnnnnnnnnnnnnnnnnnnnnnnnnnnnnnnnnnnnnnnnnnnnnnnnnnnnnnnnnnnnnnnnnnnnnnnnnnnnnnnnnnnnnnnnnnnnnnnnnnnnnnnnnnnnnnnnnnnnnnnnnnnnnnnnnnnnnnnnnnnnnnnnnnnnnnnnnnnnnnnnnnnnnnnnnnnnnnnnnnnnnnnnnnnnnnnnnnnnnnnnnnnnnnnnnnnnnnnnnnnnnnnnnnnnnnnnnnnnnnnnnnnnnnnnnnnnnnnnnnnnnnnnnnnnnnnnnnnnnnnnnnnnnnnnnnnnnnnnnnnnnnnnnnnnnnnnnnnnnnnnnnnnnnnnnnnnnnnnnnnnnnnnnnnnnnnnnnnnnnnnnnnnnnnnnnnnnnnnnnnnnnnnnnnnnnnnnnnnnnnnnnnnnnnnnnnnnnnnnnnnnnnnnnnnnnnnnnnnnnnnnnnnnnnnnnnnnnnnnnnnnnnnnnnnnnnnnnnnnnnnnnnnnnnnnnnnnnnnnnnnnnnnnnnnnnnnnnnnnnnnnnnnnnnnnnnnnnnnnnnnnnnnnnnnnnnnnnnnnnnnnnnnnnnnnnnnnnnnnnnnnnnnnnnnnnnnnnnnnnnnnnnnnnnnnnnnnnnnnnnnnnnnnnnnnnnnnnnnnnnnnnnnnnnnnnnnnnnnnnnnnnnnnnnnnnnnnnnnnnnnnnnnnnnnnnnnnnnnnnnnnnnnnnnnnnnnnnnnnnnnnnnnnnnnnnnnnnnnnnnnnnnnnnnnnnnnnnnnnnnnnnnnnnnnnnnnnnnnnnnnnnnnnnnnnnnnnnnnnnnnnnnnnnnnnnnnnnnnnnnnnnnnnnnnnnnnnnnnnnnnnnnnnnnnnnnnnnnnnnnnnnnnnnnnnnnnnnnnnnnnnnnnnnnnnnnnnnnnnnnnnnnnnnnnnnnnnnnnnnnnnnnnnnnnnnnnnnnnnnnnnnnnnnnnnnnnnnnnnnnnnnnnnnnnnnnnnnnnnnnnnnnnnnnnnnnnnnnnnnnnnnnnnnnnnnnnnnnnnnnnnnnnnnnnnnnnnnnnnnnnnnnnnnnnnnnnnnnnnnnnnnnnnnnnnnnnnnnnnnnnnnnnnnnnnnnnnnnnnnnnnnnnnnnnnnnnnnnnnnnnnnnnnnnnnnnnnnnnnnnnnnnnnnnnnnnnnnnnnnnnnnnnnnnnnnnnnnnnnnnnnnnnnnnnnnnnnnnnnnnnnnnnnnnnnnnnnnnnnnnnnnnnnnnnnnnnnnnnnnnnnnnnnnnnnnnnnnnnnnnnnnnnnnnnnnnnnnnnnnnnnnnnnnnnnnnnnnnnnnnnnnnnnnnnnnnnnnnnnnnnnnnnnnnnnnnnnnnnnnnnnnnnnnnnnnnnnnnnnnnnnnnnnnnnnnnnnnnnnnnnnnnnnnnnnnnnnnnnnnnnnnnnnnnnnnnnnnnnnnnnnnnnnnnnnnnnnnnnnnnnnnnnnnnnnnnnnnnnnnnnnnnnnnnnnnnnnnnnnnnnnnnnnnnnnnnnnnnnnnnnnnnnnnnnnnnnnnnnnnnnnnnnnnnnnnnnnnnnnnnnnnnnnnnnnnnnnnnnnnnnnnnnnnnnnnnnnnnnnnnnnnnnnnnnnnnnnnnnnnnnnnnnnnnnnnnnnnnnnnnnnnnnnnnnnnnnnnnnnnnnnnnnnnnnnnnnnnnnnnnnnnnnnnnnnnnnnnnnnnnnnnnnnnnnnnnnnnnnnnnnnnnnnnnnnnnnnnnnnnnnnnnnnnnnnnnnnnnnnnnnnnnnnnnnnnnnnnnnnnnnnnnnnnnnnnnnnnnnnnnnnnnnnnnnnnnnnnnnnnnnnnnnnnnnnnnnnnnnnnnnnnnnnnnnnnnnnnnnnnnnnnnnnnnnnnnnnnnnnnnnnnnnnnnnnnnnnnnnnnnnnnnnnnnnnnnnnnnnnnnnnnnnnnnnnnnnnnnnnnnnnnnnnnnnnnnnnnnnnnnnnnnnnnnnnnnnnnnnnnnnnnnnnnnnnnnnnnnnnnnnnnnnnnnnnnnnnnnnnnnnnnnnnnnnnnnnnnnnnnnnnnnnnnnnnnnnnnnnnnnnnnnnnnnnnnnnnnnnnnnnnnnnnnnnnnnnnnnnnnnnnnnnnnnnnnnnnnnnnnnnnnnnnnnnnnnnnnnnnnnnnnnnnnnnnnnnnnnnnnnnnnnnnnnnnnnnnnnnnnnnnnnnnnnnnnnnnnnnnnnnnnnnnnnnnnnnnnnnnnnnnnnnnnnnnnnnnnnnnnnnnnnnnnnnnnnnnnnnnnnnnnnnnnnnnnnnnnnnnnnnnnnnnnnnnnnnnnnnnnnnnnnnnnnnnnnnnnnnnnnnnnnnnnnnnnnnnnnnnnnnnnnnnnnnnnnnnnnnnnnnnnnnnnnnnnnnnnnnnnnnnnnnnnnnnnnnnnnnnnnnnnnnnnnnnnnnnnnnnnnnnnnnnnnnnnnnnnnnnnnnnnnnnnnnnnnnnnnnnnnnnnnnnnnnnnnnnnnnnnnnnnnnnnnnnnnnnnnnnnnnnnnnnnnnnnnnnnnnnnnnnnnnnnnnnnnnnnnnnnnnnnnnnnnnnnnnnnnnnnnnnnnnnnnnnnnnnnnnnnnnnnnnnnnnnnnnnnnnnnnnnnnnnnnnnnnnnnnnnnnnnnnnnnnnnnnnnnnnnnnnnnnnnnnnnnnnnnnnnnnnnnnnnnnnnnnnnnnnnnnnnnnnnnnnnnnnnnnnnnnnnnnnnnnnnnnnnnnnnnnnnnnnnnnnnnnnnnnnnnnnnnnnnnnnnnnnnnnnnnnnnnnnnnnnnnnnnnnnnnnnnnnnnnnnnnnnnnnnnnnnnnnnnnnnnnnnnnnnnnnnnnnnnnnnnnnnnnnnnnnnnnnnnnnnnnnnnnnnnnnnnnnnnnnnnnnnnnnnnnnnnnnnnnnnnnnnnnnnnnnnnnnnnnnnnnnnnnnnnnnnnnnnnnnnnnnnnnnnnnnnnnnnnnnnnnnnnnnnnnnnnnnnnnnnnnnnnnnnnnnnnnnnnnnnnnnnnnnnnnnnnnnnnnnnnnnnnnnnnnnnnnnnnnnnnnnnnnnnnnnnnnnnnnnnnnnnnnnnnnnnnnnnnnnnnnnnnnnnnnnnnnnnnnnnnnnnnnnnnnnnnnnnnnnnnnnnnnnnnnnnnnnnnnnnnnnnnnnnnnnnnnnnnnnnnnnnnnnnnnnnnnnnnnnnnnnnnnnnnnnnnnnnnnnnnnnnnnnnnnnnnnnnnnnnnnnnnnnnnnnnnnnnnnnnnnnnnnnnnnnnnnnnnnnnnnnnnnnnnnnnnnnnnnnnnnnnnnnnnnnnnnnnnnnnnnnnnnnnnnnnnnnnnnnnnnnnnnnnnnnnnnnnnnnnnnnnnnnnnnnnnnnnnnnnnnnnnnnnnnnnnnnnnnnnnnnnnnnnnnnnnnnnnnnnnnnnnnnnnnnnnnnnnnnnnnnnnnnnnnnnnnnnnnnnnnnnnnnnnnnnnnnnnnnnnnnnnnnnnnnnnnnnnnnnnnnnnnnnnnnnnnnnnnnnnnnnnnnnnnnnnnnnnnnnnnnnnnnnnnnnnnnnnnnnnnnnnnnnnnnnnnnnnnnnnnnnnnnnnnnnnnnnnnnnnnnnnnnnnnnnnnnnnnnnnnnnnnnnnnnnnnnnnnnnnnnnnnnnnnnnnnnnnnnnnnnnnnnnnnnnnnnnnnnnnnnnnnnnnnnnnnnnnnnnnnnnnnnnnnnnnnnnnnnnnnnnnnnnnnnnnnnnnnnnnnnnnnnnnnnnnnnnnnnnnnnnnnnnnnnnnnnnnnnnnnnnnnnnnnnnnnnnnnnnnnnnnnnnnnnnnnnnnnnnnnnnnnnnnnnnnnnnnnnnnnnnnnnnnnnnnnnnnnnnnnnnnnnnnnnnnnnnnnnnnnnnnnnnnnnnnnnnnnnnnnnnnnnnnnnnnnnnnnnnnnnnnnnnnnnnnnnnnnnnnnnnnnnnnnnnnnnnnnnnnnnnnnnnnnnnnnnnnnnnnnnnnnnnnnnnnnnnnnnnnnnnnnnnnnnnnnnnnnnnnnnnnnnnnnnnnnnnnnnnnnnnnnnnnnnnnnnnnnnnnnnnnnnnnnnnnnnnnnnnnnnnnnnnnnnnnnnnnnnnnnnnnnnnnnnnnnnnnnnnnnnnnnnnnnnnnnnnnnnnnnnnnnnnnnnnnnnnnnnnnnnnnnnnnnnnnnnnnnnnnnnnnnnnnnnnnnnnnnnnnnnnnnnnnnnnnnnnnnnnnnnnnnnnnnnnnnnnnnnnnnnnnnnnnnnnnnnnnnnnnnnnnnnnnnnnnnnnnnnnnnnnnnnnnnnnnnnnnnnnnnnnnnnnnnnnnnnnnnnnnnnnnnnnnnnnnnnnnnnnnnnnnnnnnnnnnnnnnnnnnnnnnnnnnnnnnnnnnnnnnnnnnnnnnnnnnnnnnnnnnnnnnnnnnnnnnnnnnnnnnnnnnnnnnnnnnnnnnnnnnnnnnnnnnnnnnnnnnnnnnnnnnnnnnnnnnnnnnnnnnnnnnnnnnnnnnnnnnnnnnnnnnnnnnnnnnnnnnnnnnnnnnnnnnnnnnnnnnnnnnnnnnnnnnnnnnnnnnnnnnnnnnnnnnnnnnnnnnnnnnnnnnnnnnnnnnnnnnnnnnnnnnnnnnnnnnnnnnnnnnnnnnnnnnnnnnnnnnnnnnnnnnnnnnnnnnnnnnnnnnnnnnnnnnnnnnnnnnnnnnnnnnnnnnnnnnnnnnnnnnnnnnnnnnnnnnnnnnnnnnnnnnnnnnnnnnnnnnnnnnnnnnnnnnnnnnnnnnnnnnnnnnnnnnnnnnnnnnnnnnnnnnnnnnnnnnnnnnnnnnnnnnnnnnnnnnnnnnnnnnnnnnnnnnnnnnnnnnnnnnnnnnnnnnnnnnnnnnnnnnnnnnnnnnnnnnnnnnnnnnnnnnnnnnnnnnnnnnnnnnnnnnnnnnnnnnnnnnnnnnnnnnnnnnnnnnnnnnnnnnnnnnnnnnnnnnnnnnnnnnnnnnnnnnnnnnnnnnnnnnnnnnnnnnnnnnnnnnnnnnnnnnnnnnnnnnnnnnnnnnnnnnnnnnnnnnnnnnnnnnnnnnnnnnnnnnnnnnnnnnnnnnnnnnnnnnnnnnnnnnnnnnnnnnnnnnnnnnnnnnnnnnnnnnnnnnnnnnnnnnnnnnnnnnnnnnnnnnnnnnnnnnnnnnnnnnnnnnnnnnnnnnnnnnnnnnnnnnnnnnnnnnnnnnnnnnnnnnnnnnnnnnnnnnnnnnnnnnnnnnnnnnnnnnnnnnnnnnnnnnnnnnnnnnnnnnnnnnnnnnnnnnnnnnnnnnnnnnnnnnnnnnnnnnnnnnnnnnnnnnnnnnnnnnnnnnnnnnnnnnnnnnnnnnnnnnnnnnnnnnnnnnnnnnnnnnnnnnnnnnnnnnnnnnnnnnnnnnnnnnnnnnnnnnnnnnnnnnnnnnnnnnnnnnnnnnnnnnnnnnnnnnnnnnnnnnnnnnnnnnnnnnnnnnnnnnnnnnnnnnnnnnnnnnnnnnnnnnnnnnnnnnnnnnnnnnnnnnnnnnnnnnnnnnnnnnnnnnnnnnnnnnnnnnnnnnnnnnnnnnnnnnnnnnnnnnnnnnnnnnnnnnnnnnnnnnnnnnnnnnnnnnnnnnnnnnnnnnnnnnnnnnnnnnnnnnnnnnnnnnnnnnnnnnnnnnnnnnnnnnnnnnnnnnnnnnnnnnnnnnnnnnnnnnnnnnnnnnnnnnnnnnnnnnnnnnnnnnnnnnnnnnnnnnnnnnnnnnnnnnnnnnnnnnnnnnnnnnnnnnnnnnnnnnnnnnnnnnnnnnnnnnnnnnnnnnnnnnnnnnnnnnnnnnnnnnnnnnnnnnnnnnnnnnnnnnnnnnnnnnnnnnnnnnnnnnnnnnnnnnnnnnnnnnnnnnnnnnnnnnnnnnnnnnnnnnnnnnnnnnnnnnnnnnnnnnnnnnnnnnnnnnnnnnnnnnnnnnnnnnnnnnnnnnnnnnnnnnnnnnnnnnnnnnnnnnnnnnnnnnnnnnnnnnnnnnnnnnnnnnnnnnnnnnnnnnnnnnnnnnnnnnnnnnnnnnnnnnnnnnnnnnnnnnnnnnnnnnnnnnnnnnnnnnnnnnnnnnnnnnnnnnnnnnnnnnnnnnnnnnnnnnnnnnnnnnnnnnnnnnnnnnnnnnnnnnnnnnnnnnnnnnnnnnnnnnnnnnnnnnnnnnnnnnnnnnnnnnnnnnnnnnnnnnnnnnnnnnnnnnnnnnnnnnnnnnnnnnnnnnnnnnnnnnnnnnnnnnnnnnnnnnnnnnnnnnnnnnnnnnnnnnnnnnnnnnnnnnnnnnnnnnnnnnnnnnnnnnnnnnnnnnnnnnnnnnnnnnnnnnnnnnnnnnnnnnnnnnnnnnnnnnnnnnnnnnnnnnnnnnnnnnnnnnnnnnnnnnnnnnnnnnnnnnnnnnnnnnnnnnnnnnnnnnnnnnnnnnnnnnnnnnnnnnnnnnnnnnnnnnnnnnnnnnnnnnnnnnnnnnnnnnnnnnnnnnnnnnnnnnnnnnnnnnnnnnnnnnnnnnnnnnnnnnnnnnnnnnnnnnnnnnnnnnnnnnnnnnnnnnnnnnnnnnnnnnnnnnnnnnnnnnnnnnnnnnnnnnnnnnnnnnnnnnnnnnnnnnnnnnnnnnnnnnnnnnnnnnnnnnnnnnnnnnnnnnnnnnnnnnnnnnnnnnnnnnnnnnnnnnnnnnnnnnnnnnnnnnnnnnnnnnnnnnnnnnnnnnnnnnnnnnnnnnnnnnnnnnnnnnnnnnnnnnnnnnnnnnnnnnnnnnnnnnnnnnnnnnnnnnnnnnnnnnnnnnnnnnnnnnnnnnnnnnnnnnnnnnnnnnnnnnnnnnnnnnnnnnnnnnnnnnnnnnnnnnnnnnnnnnnnnnnnnnnnnnnnnnnnnnnnnnnnnnnnnnnnnnnnnnnnnnnnnnnnnnnnnnnnnnnnnnnnnnnnnnnnnnnnnnnnnnnnnnnnnnnnnnnnnnnnnnnnnnnnnnnnnnnnnnnnnnnnnnnnnnnnnnnnnnnnnnnnnnnnnnnnnnnnnnnnnnnnnnnnnnnnnnnnnnnnnnnnnnnnnnnnnnnnnnnnnnnnnnnnnnnnnnnnnnnnnnnnnnnnnnnnnnnnnnnnnnnnnnnnnnnnnnnnnnnnnnnnnnnnnnnnnnnnnnnnnnnnnnnnnnnnnnnnnnnnnnnnnnnnnnnnnnnnnnnnnnnnnnnnnnnnnnnnnnnnnnnnnnnnnnnnnnnnnnnnnnnnnnnnnnnnnnnnnnnnnnnnnnnnnnnnnnnnnnnnnnnnnnnnnnnnnnnnnnnnnnnnnnnnnnnnnnnnnnnnnnnnnnnnnnnnnnnnnnnnnnnnnnnnnnnnnnnnnnnnnnnnnnnnnnnnnnnnnnnnnnnnnnnnnnnnnnnnnnnnnnnnnnnnnnnnnnnnnnnnnnnnnnnnnnnnnnnnnnnnnnnnnnnnnnnnnnnnnnnnnnnnnnnnnnnnnnnnnnnnnnnnnnnnnnnnnnnnnnnnnnnnnnnnnnnnnnnnnnnnnnnnnnnnnnnnnnnnnnnnnnnnnnnnnnnnnnnnnnnnnnnnnnnnnnnnnnnnnnnnnnnnnnnnnnnnnnnnnnnnnnnnnnnnnnnnnnnnnnnnnnnnnnnnnnnnnnnnnnnnnnnnnnnnnnnnnnnnnnnnnnnnnnnnnnnnnnnnnnnnnnnnnnnnnnnnnnnnnnnnnnnnnnnnnnnnnnnnnnnnnnnnnnnnnnnnnnnnnnnnnnnnnnnnnnnnnnnnnnnnnnnnnnnnnnnnnnnnnnnnnnnnnnnnnnnnnnnnnnnnnnnnnnnnnnnnnnnnnnnnnnnnnnnnnnnnnnnnnnnnnnnnnnnnnnnnnnnnnnnnnnnnnnnnnnnnnnnnnnnnnnnnnnnnnnnnnnnnnnnnnnnnnnnnnnnnnnnnnnnnnnnnnnnnnnnnnnnnnnnnnnnnnnnnnnnnnnnnnnnnnnnnnnnnnnnnnnnnnnnnnnnnnnnnnnnnnnnnnnnnnnnnnnnnnnnnnnnnnnnnnnnnnnnnnnnnnnnnnnnnnnnnnnnnnnnnnnnnnnnnnnnnnnnnnnnnnnnnnnnnnnnnnnnnnnnnnnnnnnnnnnnnnnnnnnnnnnnnnnnnnnnnnnnnnnnnnnnnnnnnnnnnnnnnnnnnnnnnnnnnnnnnnnnnnnnnnnnnnnnnnnnnnnnnnnnnnnnnnnnnnnnnnnnnnnnnnnnnnnnnnnnnnnnnnnnnnnnnnnnnnnnnnnnnnnnnnnnnnnnnnnnnnnnnnnnnnnnnnnnnnnnnnnnnnnnnnnnnnnnnnnnnnnnnnnnnnnnnnnnnnnnnnnnnnnnnnnnnnnnnnnnnnnnnnnnnnnnnnnnnnnnnnnnnnnnnnnnnnnnnnnnnnnnnnnnnnnnnnnnnnnnnnnnnnnnnnnnnnnnnnnnnnnnnnnnnnnnnnnnnnnnnnnnnnnnnnnnnnnnnnnnnnnnnnnnnnnnnnnnnnnnnnnnnnnnnnnnnnnnnnnnnnnnnnnnnnnnnnnnnnnnnnnnnnnnnnnnnnnnnnnnnnnnnnnnnnnnnnnnnnnnnnnnnnnnnnnnnnnnnnnnnnnnnnnnnnnnnnnnnnnnnnnnnnnnnnnnnnnnnnnnnnnnnnnnnnnnnnnnnnnnnnnnnnnnnnnnnnnnnnnnnnnnnnnnnnnnnnnnnnnnnnnnnnnnnnnnnnnnnnnnnnnnnnnnnnnnnnnnnnnnnnnnnnnnnnnnnnnnnnnnnnnnnnnnnnnnnnnnnnnnnnnnnnnnnnnnnnnnnnnnnnnnnnnnnnnnnnnnnnnnnnnnnnnnnnnnnnnnnnnnnnnnnnnnnnnnnnnnnnnnnnnnnnnnnnnnnnnnnnnnnnnnnnnnnnnnnnnnnnnnnnnnnnnnnnnnnnnnnnnnnnnnnnnnnnnnnnnnnnnnnnnnnnnnnnnnnnnnnnnnnnnnnnnnnnnnnnnnnnnnnnnnnnnnnnnnnnnnnnnnnnnnnnnnnnnnnnnnnnnnnnnnnnnnnnnnnnnnnnnnnnnnnnnnnnnnnnnnnnnnnnnnnnnnnnnnnnnnnnnnnnnnnnnnnnnnnnnnnnnnnnnnnnnnnnnnnnnnnnnnnnnnnnnnnnnnnnnnnnnnnnnnnnnnnnnnnnnnnnnnnnnnnnnnnnnnnnnnnnnnnnnnnnnnnnnnnnnnnnnnnnnnnnnnnnnnnnnnnnnnnnnnnnnnnnnnnnnnnnnnnnnnnnnnnnnnnnnnnnnnnnnnnnnnnnnnnnnnnnnnnnnnnnnnnnnnnnnnnnnnnnnnnnnnnnnnnnnnnnnnnnnnnnnnnnnnnnnnnnnnnnnnnnnnnnnnnnnnnnnnnnnnnnnnnnnnnnnnnnnnnnnnnnnnnnnnnnnnnnnnnnnnnnnnnnnnnnnnnnnnnnnnnnnnnnnnnnnnnnnnnnnnnnnnnnnnnnnnnnnnnnnnnnnnnnnnnnnnnnnnnnnnnnnnnnnnnnnnnnnnnnnnnnnnnnnnnnnnnnnnnnnnnnnnnnnnnnnnnnnnnnnnnnnnnnnnnnnnnnnnnnnnnnnnnnnnnnnnnnnnnnnnnnnnnnnnnnnnnnnnnnnnnnnnnnnnnnnnnnnnnnnnnnnnnnnnnnnnnnnnnnnnnnnnnnnnnnnnnnnnnnnnnnnnnnnnnnnnnnnnnnnnnnnnnnnnnnnnnnnnnnnnnnnnnnnnnnnnnnnnnnnnnnnnnnnnnnnnnnnnnnnnnnnnnnnnnnnnnnnnnnnnnnnnnnnnnnnnnnnnnnnnnnnnnnnnnnnnnnnnnnnnnnnnnnnnnnnnnnnnnnnnnnnnnnnnnnnnnnnnnnnnnnnnnnnnnnnnnnnnnnnnnnnnnnnnnnnnnnnnnnnnnnnnnnnnnnnnnnnnnnnnnnnnnnnnnnnnnnnnnnnnnnnnnnnnnnnnnnnnnnnnnnnnnnnnnnnnnnnnnnnnnnnnnnnnnnnnnnnnnnnnnnnnnnnnnnnnnnnnnnnnnnnnnnnnnnnnnnnnnnnnnnnnnnnnnnnnnnnnnnnnnnnnnnnnnnnnnnnnnnnnnnnnnnnnnnnnnnnnnnnnnnnnnnnnnnnnnnnnnnnnnnnnnnnnnnnnnnnnnnnnnnnnnnnnnnnnnnnnnnnnnnnnnnnnnnnnnnnnnnnnnnnnnnnnnnnnnnnnnnnnnnnnnnnnnnnnnnnnnnnnnnnnnnnnnnnnnnnnnnnnnnnnnnnnnnnnnnnnnnnnnnnnnnnnnnnnnnnnnnnnnnnnnnnnnnnnnnnnnnnnnnnnnnnnnnnnnnnnnnnnnnnnnnnnnnnnnnnnnnnnnnnnnnnnnnnnnnnnnnnnnnnnnnnnnnnnnnnnnnnnnnnnnnnnnnnnnnnnnnnnnnnnnnnnnnnnnnnnnnnnnnnnnnnnnnnnnnnnnnnnnnnnnnnnnnnnnnnnnnnnnnnnnnnnnnnnnnnnnnnnnnnnnnnnnnnnnnnnnnnnnnnnnnnnnnnnnnnnnnnnnnnnnnnnnnnnnnnnnnnnnnnnnnnnnnnnnnnnnnnnnnnnnnnnnnnnnnnnnnnnnnnnnnnnnnnnnnnnnnnnnnnnnnnnnnnnnnnnnnnnnnnnnnnnnnnnnnnnnnnnnnnnnnnnnnnnnnnnnnnnnnnnnnnnnnnnnnnnnnnnnnnnnnnnnnnnnnnnnnnnnnnnnnnnnnnnnnnnnnnnnnnnnnnnnnnnnnnnnnnnnnnnnnnnnnnnnnnnnnnnnnnnnnnnnnnnnnnnnnnnnnnnnnnnnnnnnnnnnnnnnnnnnnnnnnnnnnnnnnnnnnnnnnnnnnnnnnnnnnnnnnnnnnnnnnnnnnnnnnnnnnnnnnnnnnnnnnnnnnnnnnnnnnnnnnnnnnnnnnnnnnnnnnnnnnnnnnnnnnnnnnnnnnnnnnnnnnnnnnnnnnnnnnnnnnnnnnnnnnnnnnnnnnnnnnnnnnnnnnnnnnnnnnnnnnnnnnnnnnnnnnnnnnnnnnnnnnnnnnnnnnnnnnnnnnnnnnnnnnnnnnnnnnnnnnnnnnnnnnnnnnnnnnnnnnnnnnnnnnnnnnnnnnnnnnnnnnnnnnnnnnnnnnnnnnnnnnnnnnnnnnnnnnnnnnnnnnnnnnnnnnnnnnnnnnnnnnnnnnnnnnnnnnnnnnnnnnnnnnnnnnnnnnnnnnnnnnnnnnnnnnnnnnnnnnnnnnnnnnnnnnnnnnnnnnnnnnnnnnnnnnnnnnnnnnnnnnnnnnnnnnnnnnnnnnnnnnnnnnnnnnnnnnnnnnnnnnnnnnnnnnnnnnnnnnnnnnnnnnnnnnnnnnnnnnnnnnnnnnnnnnnnnnnnnnnnnnnnnnnnnnnnnnnnnnnnnnnnnnnnnnnnnnnnnnnnnnnnnnnnnnnnnnnnnnnnnnnnnnnnnnnnnnnnnnnnnnnnnnnnnnnnnnnnnnnnnnnnnnnnnnnnnnnnnnnnnnnnnnnnnnnnnnnnnnnnnnnnnnnnnnnnnnnnnnnnnnnnnnnnnnnnnnnnnnnnnnnnnnnnnnnnnnnnnnnnnnnnnnnnnnnnnnnnnnnnnnnnnnnnnnnnnnnnnnnnnnnnnnnnnnnnnnnnnnnnnnnnnnnnnnnnnnnnnnnnnnnnnnnnnnnnnnnnnnnnnnnnnnnnnnnnnnnnnnnnnnnnnnnnnnnnnnnnnnnnnnnnnnnnnnnnnnnnnnnnnnnnnnnnnnnnnnnnnnnnnnnnnnnnnnnnnnnnnnnnnnnnnnnnnnnnnnnnnnnnnnnnnnnnnnnnnnnnnnnnnnnnnnnnnnnnnnnnnnnnnnnnnnnnnnnnnnnnnnnnnnnnnnnnnnnnnnnnnnnnnnnnnnnnnnnnnnnnnnnnnnnnnnnnnnnnnnnnnnnnnnnnnnnnnnnnnnnnnnnnnnnnnnnnnnnnnnnnnnnnnnnnnnnnnnnnnnnnnnnnnnnnnnnnnnnnnnnnnnnnnnnnnnnnnnnnnnnnnnnnnnnnnnnnnnnnnnnnnnnnnnnnnnnnnnnnnnnnnnnnnnnnnnnnnnnnnnnnnnnnnnnnnnnnnnnnnnnnnnnnnnnnnnnnnnnnnnnnnnnnnnnnnnnnnnnnnnnnnnnnnnnnnnnnnnnnnnnnnnnnnnnnnnnnnnnnnnnnnnnnnnnnnnnnnnnnnnnnnnnnnnnnnnnnnnnnnnnnnnnnnnnnnnnnnnnnnnnnnnnnnnnnnnnnnnnnnnnnnnnnnnnnnnnnnnnnnnnnnnnnnnnnnnnnnnnnnnnnnnnnnnnnnnnnnnnnnnnnnnnnnnnnnnnnnnnnnnnnnnnnnnnnnnnnnnnnnnnnnnnnnnnnnnnnnnnnnnnnnnnnnnnnnnnnnnnnnnnnnnnnnnnnnnnnnnnnnnnnnnnnnnnnnnnnnnnnnnnnnnnnnnnnnnnnnnnnnnnnnnnnnnnnnnnnnnnnnnnnnnnnnnnnnnnnnnnnnnnnnnnnnnnnnnnnnnnnnnnnnnnnnnnnnnnnnnnnnnnnnnnnnnnnnnnnnnnnnnnnnnnnnnnnnnnnnnnnnnnnnnnnnnnnnnnnnnnnnnnnnnnnnnnnnnnnnnnnnnnnnnnnnnnnnnnnnnnnnnnnnnnnnnnnnnnnnnnnnnnnnnnnnnnnnnnnnnnnnnnnnnnnnnnnnnnnnnnnnnnnnnnnnnnnnnnnnnnnnnnnnnnnnnnnnnnnnnnnnnnnnnnnnnnnnnnnnnnnnnnnnnnnnnnnnnnnnnnnnnnnnnnnnnnnnnnnnnnnnnnnnnnnnnnnnnnnnnnnnnnnnnnnnnnnnnnnnnnnnnnnnnnnnnnnnnnnnnnnnnnnnnnnnnnnnnnnnnnnnnnnnnnnnnnnnnnnnnnnnnnnnnnnnnnnnnnnnnnnnnnnnnnnnnnnnnnnnnnnnnnnnnnnnnnnnnnnnnnnnnnnnnnnnnnnnnnnnnnnnnnnnnnnnnnnnnnnnnnnnnnnnnnnnnnnnnnnnnnnnnnnnnnnnnnnnnnnnnnnnnnnnnnnnnnnnnnnnnnnnnnnnnnnnnnnnnnnnnnnnnnnnnnnnnnnnnnnnnnnnnnnnnnnnnnnnnnnnnnnnnnnnnnnnnnnnnnnnnnnnnnnnnnnnnnnnnnnnnnnnnnnnnnnnnnnnnnnnnnnnnnnnnnnnnnnnnnnnnnnnnnnnnnnnnnnnnnnnnnnnnnnnnnnnnnnnnnnnnnnnnnnnnnnnnnnnnnnnnnnnnnnnnnnnnnnnnnnnnnnnnnnnnnnnnnnnnnnnnnnnnnnnnnnnnnnnnnnnnnnnnnnnnnnnnnnnnnnnnnnnnnnnnnnnnnnnnnnnnnnnnnnnnnnnnnnnnnnnnnnnnnnnnnnnnnnnnnnnnnnnnnnnnnnnnnnnnnnnnnnnnnnnnnnnnnnnnnnnnnnnnnnnnnnnnnnnnnnnnnnnnnnnnnnnnnnnnnnnnnnnnnnnnnnnnnnnnnnnnnnnnnnnnnnnnnnnnnnnnnnnnnnnnnnnnnnnnnnnnnnnnnnnnnnnnnnnnnnnnnnnnnnnnnnnnnnnnnnnnnnnnnnnnnnnnnnnnnnnnnnnnnnnnnnnnnnnnnnnnnnnnnnnnnnnnnnnnnnnnnnnnnnnnnnnnnnnnnnnnnnnnnnnnnnnnnnnnnnnnnnnnnnnnnnnnnnnnnnnnnnnnnnnnnnnnnnnnnnnnnnnnnnnnnnnnnnnnnnnnnnnnnnnnnnnnnnnnnnnnnnnnnnnnnnnnnnnnnnnnnnnnnnnnnnnnnnnnnnnnnnnnnnnnnnnnnnnnnnnnnnnnnnnnnnnnnnnnnnnnnnnnnnnnnnnnnnnnnnnnnnnnnnnnnnnnnnnnnnnnnnnnnnnnnnnnnnnnnnnnnnnnnnnnnnnnnnnnnnnnnnnnnnnnnnnnnnnnnnnnnnnnnnnnnnnnnnnnnnnnnnnnnnnnnnnnnnnnnnnnnnnnnnnnnnnnnnnnnnnnnnnnnnnnnnnnnnnnnnnnnnnnnnnnnnnnnnnnnnnnnnnnnnnnnnnnnnnnnnnnnnnnnnnnnnnnnnnnnnnnnnnnnnnnnnnnnnnnnnnnnnnnnnnnnnnnnnnnnnnnnnnnnnnnnnnnnnnnnnnnnnnnnnnnnnnnnnnnnnnnnnnnnnnnnnnnnnnnnnnnnnnnnnnnnnnnnnnnnnnnnnnnnnnnnnnnnnnnnnnnnnnnnnnnnnnnnnnnnnnnnnnnnnnnnnnnnnnnnnnnnnnnnnnnnnnnnnnnnnnnnnnnnnnnnnnnnnnnnnnnnnnnnnnnnnnnnnnnnnnnnnnnnnnnnnnnnnnnnnnnnnnnnnnnnnnnnnnnnnnnnnnnnnnnnnnnnnnnnnnnnnnnnnnnnnnnnnnnnnnnnnnnnnnnnnnnnnnnnnnnnnnnnnnnnnnnnnnnnnnnnnnnnnnnnnnnnnnnnnnnnnnnnnnnnnnnnnnnnnnnnnnnnnnnnnnnnnnnnnnnnnnnnnnnnnnnnnnnnnnnnnnnnnnnnnnnnnnnnnnnnnnnnnnnnnnnnnnnnnnnnnnnnnnnnnnnnnnnnnnnnnnnnnnnnnnnnnnnnnnnnnnnnnnnnnnnnnnnnnnnnnnnnnnnnnnnnnnnnnnnnnnnnnnnnnnnnnnnnnnnnnnnnnnnnnnnnnnnnnnnnnnnnnnnnnnnnnnnnnnnnnnnnnnnnnnnnnnnnnnnnnnnnnnnnnnnnnnnnnnnnnnnnnnnnnnnnnnnnnnnnnnnnnnnnnnnnnnnnnnnnnnnnnnnnnnnnnnnnnnnnnnnnnnnnnnnnnnnnnnnnnnnnnnnnnnnnnnnnnnnnnnnnnnnnnnnnnnnnnnnnnnnnnnnnnnnnnnnnnnnnnnnnnnnnnnnnnnnnnnnnnnnnnnnnnnnnnnnnnnnnnnnnnnnnnnnnnnnnnnnnnnnnnnnnnnnnnnnnnnnnnnnnnnnnnnnnnnnnnnnnnnnnnnnnnnnnnnnnnnnnnnnnnnnnnnnnnnnnnnnnnnnnnnnnnnnnnnnnnnnnnnnnnnnnnnnnnnnnnnnnnnnnnnnnnnnnnnnnnnnnnnnnnnnnnnnnnnnnnnnnnnnnnnnnnnnnnnnnnnnnnnnnnnnnnnnnnnnnnnnnnnnnnnnnnnnnnnnnnnnnnnnnnnnnnnnnnnnnnnnnnnnnnnnnnnnnnnnnnnnnnnnnnnnnnnnnnnnnnnnnnnnnnnnnnnnnnnnnnnnnnnnnnnnnnnnnnnnnnnnnnnnnnnnnnnnnnnnnnnnnnnnnnnnnnnnnnnnnnnnnnnnnnnnnnnnnnnnnnnnnnnnnnnnnnnnnnnnnnnnnnnnnnnnnnnnnnnnnnnnnnnnnnnnnnnnnnnnnnnnnnnnnnnnnnnnnnnnnnnnnnnnnnnnnnnnnnnnnnnnnnnnnnnnnnnnnnnnnnnnnnnnnnnnnnnnnnnnnnnnnnnnnnnnnnnnnnnnnnnnnnnnnnnnnnnnnnnnnnnnnnnnnnnnnnnnnnnnnnnnnnnnnnnnnnnnnnnnnnnnnnnnnnnnnnnnnnnnnnnnnnnnnnnnnnnnnnnnnnnnnnnnnnnnnnnnnnnnnnnnnnnnnnnnnnnnnnnnnnnnnnnnnnnnnnnnnnnnnnnnnnnnnnnnnnnnnnnnnnnnnnnnnnnnnnnnnnnnnnnnnnnnnnnnnnnnnnnnnnnnnnnnnnnnnnnnnnnnnnnnnnnnnnnnnnnnnnnnnnnnnnnnnnnnnnnnnnnnnnnnnnnnnnnnnnnnnnnnnnnnnnnnnnnnnnnnnnnnnnnnnnnnnnnnnnnnnnnnnnnnnnnnnnnnnnnnnnnnnnnnnnnnnnnnnnnnnnnnnnnnnnnnnnnnnnnnnnnnnnnnnnnnnnnnnnnnnnnnnnnnnnnnnnnnnnnnnnnnnnnnnnnnnnnnnnnnnnnnnnnnnnnnnnnnnnnnnnnnnnnnnnnnnnnnnnnnnnnnnnnnnnnnnnnnnnnnnnnnnnnnnnnnnnnnnnnnnnnnnnnnnnnnnnnnnnnnnnnnnnnnnnnnnnnnnnnnnnnnnnnnnnnnnnnnnnnnnnnnnnnnnnnnnnnnnnnnnnnnnnnnnnnnnnnnnnnnnnnnnnnnnnnnnnnnnnnnnnnnnnnnnnnnnnnnnnnnnnnnnnnnnnnnnnnnnnnnnnnnnnnnnnnnnnnnnnnnnnnnnnnnnnnnnnnnnnnnnnnnnnnnnnnnnnnnnnnnnnnnnnnnnnnnnnnnnnnnnnnnnnnnnnnnnnnnnnnnnnnnnnnnnnnnnnnnnnnnnnnnnnnnnnnnnnnnnnnnnnnnnnnnnnnnnnnnnnnnnnnnnnnnnnnnnnnnnnnnnnnnnnnnnnnnnnnnnnnnnnnnnnnnnnnnnnnnnnnnnnnnnnnnnnnnnnnnnnnnnnnnnnnnnnnnnnnnnnnnnnnnnnnnnnnnnnnnnnnnnnnnnnnnnnnnnnnnnnnnnnnnnnnnnnnnnnnnnnnnnnnnnnnnnnnnnnnnnnnnnnnnnnnnnnnnnnnnnnnnnnnnnnnnnnnnnnnnnnnnnnnnnnnnnnnnnnnnnnnnnnnnnnnnnnnnnnnnnnnnnnnnnnnnnnnnnnnnnnnnnnnnnnnnnnnnnnnnnnnnnnnnnnnnnnnnnnnnnnnnnnnnnnnnnnnnnnnnnnnnnnnnnnnnnnnnnnnnnnnnnnnnnnnnnnnnnnnnnnnnnnnnnnnnnnnnnnnnnnnnnnnnnnnnnnnnnnnnnnnnnnnnnnnnnnnnnnnnnnnnnnnnnnnnnnnnnnnnnnnnnnnnnnnnnnnnnnnnnnnnnnnnnnnnnnnnnnnnnnnnnnnnnnnnnnnnnnnnnnnnnnnnnnnnnnnnnnnnnnnnnnnnnnnnnnnnnnnnnnnnnnnnnnnnnnnnnnnnnnnnnnnnnnnnnnnnnnnnnnnnnnnnnnnnnnnnnnnnnnnnnnnnnnnnnnnnnnnnnnnnnnnnnnnnnnnnnnnnnnnnnnnnnnnnnnnnnnnnnnnnnnnnnnnnnnnnnnnnnnnnnnnnnnnnnnnnnnnnnnnnnnnnnnnnnnnnnnnnnnnnnnnnnnnnnnnnnnnnnnnnnnnnnnnnnnnnnnnnnnnnnnnnnnnnnnnnnnnnnnnnnnnnnnnnnnnnnnnnnnnnnnnnnnnnnnnnnnnnnnnnnnnnnnnnnnnnnnnnnnnnnnnnnnnnnnnnnnnnnnnnnnnnnnnnnnnnnnnnnnnnnnnnnnnnnnnnnnnnnnnnnnnnnnnnnnnnnnnnnnnnnnnnnnnnnnnnnnnnnnnnnnnnnnnnnnnnnnnnnnnnnnnnnnnnnnnnnnnnnnnnnnnnnnnnnnnnnnnnnnnnnnnnnnnnnnnnnnnnnnnnnnnnnnnnnnnnnnnnnnnnnnnnnnnnnnnnnnnnnnnnnnnnnnnnnnnnnnnnnnnnnnnnnnnnnnnnnnnnnnnnnnnnnnnnnnnnnnnnnnnnnnnnnnnnnnnnnnnnnnnnnnnnnnnnnnnnnnnnnnnnnnnnnnnnnnnnnnnnnnnnnnnnnnnnnnnnnnnnnnnnnnnnnnnnnnnnnnnnnnnnnnnnnnnnnnnnnnnnnnnnnnnnnnnnnnnnnnnnnnnnnnnnnnnnnnnnnnnnnnnnnnnnnnnnnnnnnnnnnnnnnnnnnnnnnnnnnnnnnnnnnnnnnnnnnnnnnnnnnnnnnnnnnnnnnnnnnnnnnnnnnnnnnnnnnnnnnnnnnnnnnnnnnnnnnnnnnnnnnnnnnnnnnnnnnnnnnnnnnnnnnnnnnnnnnnnnnnnnnnnnnnnnnnnnnnnnnnnnnnnnnnnnnnnnnnnnnnnnnnnnnnnnnnnnnnnnnnnnnnnnnnnnnnnnnnnnnnnnnnnnnnnnnnnnnnnnnnnnnnnnnnnnnnnnnnnnnnnnnnnnnnnnnnnnnnnnnnnnnnnnnnnnnnnnnnnnnnnnnnnnnnnnnnnnnnnnnnnnnnnnnnnnnnnnnnnnnnnnnnnnnnnnnnnnnnnnnnnnnnnnnnnnnnnnnnnnnnnnnnnnnnnnnnnnnnnnnnnnnnnnnnnnnnnnnnnnnnnnnnnnnnnnnnnnnnnnnnnnnnnnnnnnnnnnnnnnnnnnnnnnnnnnnnnnnnnnnnnnnnnnnnnnnnnnnnnnnnnnnnnnnnnnnnnnnnnnnnnnnnnnnnnnnnnnnnnnnnnnnnnnnnnnnnnnnnnnnnnnnnnnnnnnnnnnnnnnnnnnnnnnnnnnnnnnnnnnnnnnnnnnnnnnnnnnnnnnnnnnnnnnnnnnnnnnnnnnnnnnnnnnnnnnnnnnnnnnnnnnnnnnnnnnnnnnnnnnnnnnnnnnnnnnnnnnnnnnnnnnnnnnnnnnnnnnnnnnnnnnnnnnnnnnnnnnnnnnnnnnnnnnnnnnnnnnnnnnnnnnnnnnnnnnnnnnnnnnnnnnnnnnnnnnnnnnnnnnnnnnnnnnnnnnnnnnnnnnnnnnnnnnnnnnnnnnnnnnnnnnnnnnnnnnnnnnnnnnnnnnnnnnnnnnnnnnnnnnnnnnnnnnnnnnnnnnnnnnnnnnnnnnnnnnnnnnnnnnnnnnnnnnnnnnnnnnnnnnnnnnnnnnnnnnnnnnnnnnnnnnnnnnnnnnnnnnnnnnnnnnnnnnnnnnnnnnnnnnnnnnnnnnnnnnnnnnnnnnnnnnnnnnnnnnnnnnnnnnnnnnnnnnnnnnnnnnnnnnnnnnnnnnnnnnnnnnnnnnnnnnnnnnnnnnnnnnnnnnnnnnnnnnnnnnnnnnnnnnnnnnnnnnnnnnnnnnnnnnnnnnnnnnnnnnnnnnnnnnnnnnnnnnnnnnnnnnnnnnnnnnnnnnnnnnnnnnnnnnnnnnnnnnnnnnnnnnnnnnnnnnnnnnnnnnnnnnnnnnnnnnnnnnnnnnnnnnnnnnnnnnnnnnnnnnnnnnnnnnnnnnnnnnnnnnnnnnnnnnnnnnnnnnnnnnnnnnnnnnnnnnnnnnnnnnnnnnnnnnnnnnnnnnnnnnnnnnnnnnnnnnnnnnnnnnnnnnnnnnnnnnnnnnnnnnnnnnnnnnnnnnnnnnnnnnnnnnnnnnnnnnnnnnnnnnnnnnnnnnnnnnnnnnnnnnnnnnnnnnnnnnnnnnnnnnnnnnnnnnnnnnnnnnnnnnnnnnnnnnnnnnnnnnnnnnnnnnnnnnnnnnnnnnnnnnnnnnnnnnnnnnnnnnnnnnnnnnnnnnnnnnnnnnnnnnnnnnnnnnnnnnnnnnnnnnnnnnnnnnnnnnnnnnnnnnnnnnnnnnnnnnnnnnnnnnnnnnnnnnnnnnnnnnnnnnnnnnnnnnnnnnnnnnnnnnnnnnnnnnnnnnnnnnnnnnnnnnnnnnnnnnnnnnnnnnnnnnnnnnnnnnnnnnnnnnnnnnnnnnnnnnnnnnnnnnnnnnnnnnnnnnnnnnnnnnnnnnnnnnnnnnnnnnnnnnnnnnnnnnnnnnnnnnnnnnnnnnnnnnnnnnnnnnnnnnnnnnnnnnnnnnnnnnnnnnnnnnnnnnnnnnnnnnnnnnnnnnnnnnnnnnnnnnnnnnnnnnnnnnnnnnnnnnnnnnnnnnnnnnnnnnnnnnnnnnnnnnnnnnnnnnnnnnnnnnnnnnnnnnnnnnnnnnnnnnnnnnnnnnnnnnnnnnnnnnnnnnnnnnnnnnnnnnnnnnnnnnnnnnnnnnnnnnnnnnnnnnnnnnnnnnnnnnnnnnnnnnnnnnnnnnnnnnnnnnnnnnnnnnnnnnnnnnnnnnnnnnnnnnnnnnnnnnnnnnnnnnnnnnnnnnnnnnnnnnnnnnnnnnnnnnnnnnnnnnnnnnnnnnnnnnnnnnnnnnnnnnnnnnnnnnnnnnnnnnnnnnnnnnnnnnnnnnnnnnnnnnnnnnnnnnnnnnnnnnnnnnnnnnnnnnnnnnnnnnnnnnnnnnnnnnnnnnnnnnnnnnnnnnnnnnnnnnnnnnnnnnnnnnnnnnnnnnnnnnnnnnnnnnnnnnnnnnnnnnnnnnnnnnnnnnnnnnnnnnnnnnnnnnnnnnnnnnnnnnnnnnnnnnnnnnnnnnnnnnnnnnnnnnnnnnnnnnnnnnnnnnnnnnnnnnnnnnnnnnnnnnnnnnnnnnnnnnnnnnnnnnnnnnnnnnnnnnnnnnnnnnnnnnnnnnnnnnnnnnnnnnnnnnnnnnnnnnnnnnnnnnnnnnnnnnnnnnnnnnnnnnnnnnnnnnnnnnnnnnnnnnnnnnnnnnnnnnnnnnnnnnnnnnnnnnnnnnnnnnnnnnnnnnnnnnnnnnnnnnnnnnnnnnnnnnnnnnnnnnnnnnnnnnnnnnnnnnnnnnnnnnnnnnnnnnnnnnnnnnnnnnnnnnnnnnnnnnnnnnnnnnnnnnnnnnnnnnnnnnnnnnnnnnnnnnnnnnnnnnnnnnnnnnnnnnnnnnnnnnnnnnnnnnnnnnnnnnnnnnnnnnnnnnnnnnnnnnnnnnnnnnnnnnnnnnnnnnnnnnnnnnnnnnnnnnnnnnnnnnnnnnnnnnnnnnnnnnnnnnnnnnnnnnnnnnnnnnnnnnnnnnnnnnnnnnnnnnnnnnnnnnnnnnnnnnnnnnnnnnnnnnnnnnnnnnnnnnnnnnnnnnnnnnnnnnnnnnnnnnnnnnnnnnnnnnnnnnnnnnnnnnnnnnnnnnnnnnnnnnnnnnnnnnnnnnnnnnnnnnnnnnnnnnnnnnnnnnnnnnnnnnnnnnnnnnnnnnnnnnnnnnnnnnnnnnnnnnnnnnnnnnnnnnnnnnnnnnnnnnnnnnnnnnnnnnnnnnnnnnnnnnnnnnnnnnnnnnnnnnnnnnnnnnnnnnnnnnnnnnnnnnnnnnnnnnnnnnnnnnnnnnnnnnnnnnnnnnnnnnnnnnnnnnnnnnnnnnnnnnnnnnnnnnnnnnnnnnnnnnnnnnnnnnnnnnnnnnnnnnnnnnnnnnnnnnnnnnnnnnnnnnnnnnnnnnnnnnnnnnnnnnnnnnnnnnnnnnnnnnnnnnnnnnnnnnnnnnnnnnnnnnnnnnnnnnnnnnnnnnnnnnnnnnnnnnnnnnnnnnnnnnnnnnnnnnnnnnnnnnnnnnnnnnnnnnnnnnnnnnnnnnnnnnnnnnnnnnnnnnnnnnnnnnnnnnnnnnnnnnnnnnnnnnnnnnnnnnnnnnnnnnnnnnnnnnnnnnnnnnnnnnnnnnnnnnnnnnnnnnnnnnnnnnnnnnnnnnnnnnnnnnnnnnnnnnnnnnnnnnnnnnnnnnnnnnnnnnnnnnnnnnnnnnnnnnnnnnnnnnnnnnnnnnnnnnnnnnnnnnnnnnnnnnnnnnnnnnnnnnnnnnnnnnnnnnnnnnnnnnnnnnnnnnnnnnnnnnnnnnnnnnnnnnnnnnnnnnnnnnnnnnnnnnnnnnnnnnnnnnnnnnnnnnnnnnnnnnnnnnnnnnnnnnnnnnnnnnnnnnnnnnnnnnnnnnnnnnnnnnnnnnnnnnnnnnnnnnnnnnnnnnnnnnnnnnnnnnnnnnnnnnnnnnnnnnnnnnnnnnnnnnnnnnnnnnnnnnnnnnnnnnnnnnnnnnnnnnnnnnnnnnnnnnnnnnnnnnnnnnnnnnnnnnnnnnnnnnnnnnnnnnnnnnnnnnnnnnnnnnnnnnnnnnnnnnnnnnnnnnnnnnnnnnnnnnnnnnnnnnnnnnnnnnnnnnnnnnnnnnnnnnnnnnnnnnnnnnnnnnnnnnnnnnnnnnnnnnnnnnnnnnnnnnnnnnnnnnnnnnnnnnnnnnnnnnnnnnnnnnnnnnnnnnnnnnnnnnnnnnnnnnnnnnnnnnnnnnnnnnnnnnnnnnnnnnnnnnnnnnnnnnnnnnnnnnnnnnnnnnnnnnnnnnnnnnnnnnnnnnnnnnnnnnnnnnnnnnnnnnnnnnnnnnnnnnnnnnnnnnnnnnnnnnnnnnnnnnnnnnnnnnnnnnnnnnnnnnnnnnnnnnnnnnnnnnnnnnnnnnnnnnnnnnnnnnnnnnnnnnnnnnnnnnnnnnnnnnnnnnnnnnnnnnnnnnnnnnnnnnnnnnnnnnnnnnnnnnnnnnnnnnnnnnnnnnnnnnnnnnnnnnnnnnnnnnnnnnnnnnnnnnnnnnnnnnnnnnnnnnnnnnnnnnnnnnnnnnnnnnnnnnnnnnnnnnnnnnnnnnnnnnnnnnnnnnnnnnnnnnnnnnnnnnnnnnnnnnnnnnnnnnnnnnnnnnnnnnnnnnnnnnnnnnnnnnnnnnnnnnnnnnnnnnnnnnnnnnnnnnnnnnnnnnnnnnnnnnnnnnnnnnnnnnnnnnnnnnnnnnnnnnnnnnnnnnnnnnnnnnnnnnnnnnnnnnnnnnnnnnnnnnnnnnnnnnnnnnnnnnnnnnnnnnnnnnnnnnnnnnnnnnnnnnnnnnnnnnnnnnnnnnnnnnnnnnnnnnnnnnnnnnnnnnnnnnnnnnnnnnnnnnnnnnnnnnnnnnnnnnnnnnnnnnnnnnnnnnnnnnnnnnnnnnnnnnnnnnnnnnnnnnnnnnnnnnnnnnnnnnnnnnnnnnnnnnnnnnnnnnnnnnnnnnnnnnnnnnnnnnnnnnnnnnnnnnnnnnnnnnnnnnnnnnnnnnnnnnnnnnnnnnnnnnnnnnnnnnnnnnnnnnnnnnnnnnnnnnnnnnnnnnnnnnnnnnnnnnnnnnnnnnnnnnnnnnnnnnnnnnnnnnnnnnnnnnnnnnnnnnnnnnnnnnnnnnnnnnnnnnnnnnnnnnnnnnnnnnnnnnnnnnnnnnnnnnnnnnnnnnnnnnnnnnnnnnnnnnnnnnnnnnnnnnnnnnnnnnnnnnnnnnnnnnnnnnnnnnnnnnnnnnnnnnnnnnnnnnnnnnnnnnnnnnnnnnnnnnnnnnnnnnnnnnnnnnnnnnnnnnnnnnnnnnnnnnnnnnnnnnnnnnnnnnnnnnnnnnnnnnnnnnnnnnnnnnnnnnnnnnnnnnnnnnnnnnnnnnnnnnnnnnnnnnnnnnnnnnnnnnnnnnnnnnnnnnnnnnnnnnnnnnnnnnnnnnnnnnnnnnnnnnnnnnnnnnnnnnnnnnnnnnnnnnnnnnnnnnnnnnnnnnnnnnnnnnnnnnnnnnnnnnnnnnnnnnnnnnnnnnnnnnnnnnnnnnnnnnnnnnnnnnnnnnnnnnnnnnnnnnnnnnnnnnnnnnnnnnnnnnnnnnnnnnnnnnnnnnnnnnnnnnnnnnnnnnnnnnnnnnnnnnnnnnnnnnnnnnnnnnnnnnnnnnnnnnnnnnnnnnnnnnnnnnnnnnnnnnnnnnnnnnnnnnnnnnnnnnnnnnnnnnnnnnnnnnnnnnnnnnnnnnnnnnnnnnnnnnnnnnnnnnnnnnnnnnnnnnnnnnnnnnnnnnnnnnnnnnnnnnnnnnnnnnnnnnnnnnnnnnnnnnnnnnnnnnnnnnnnnnnnnnnnnnnnnnnnnnnnnnnnnnnnnnnnnnnnnnnnnnnnnnnnnnnnnnnnnnnnnnnnnnnnnnnnnnnnnnnnnnnnnnnnnnnnnnnnnnnnnnnnnnnnnnnnnnnnnnnnnnnnnnnnnnnnnnnnnnnnnnnnnnnnnnnnnnnnnnnnnnnnnnnnnnnnnnnnnnnnnnnnnnnnnnnnnnnnnnnnnnnnnnnnnnnnnnnnnnnnnnnnnnnnnnnnnnnnnnnnnnnnnnnnnnnnnnnnnnnnnnnnnnnnnnnnnnnnnnnnnnnnnnnnnnnnnnnnnnnnnnnnnnnnnnnnnnnnnnnnnnnnnnnnnnnnnnnnnnnnnnnnnnnnnnnnnnnnnnnnnnnnnnnnnnnnnnnnnnnnnnnnnnnnnnnnnnnnnnnnnnnnnnnnnnnnnnnnnnnnnnnnnnnnnnnnnnnnnnnnnnnnnnnnnnnnnnnnnnnnnnnnnnnnnnnnnnnnnnnnnnnnnnnnnnnnnnnnnnnnnnnnnnnnnnnnnnnnnnnnnnnnnnnnnnnnnnnnnnnnnnnnnnnnnnnnnnnnnnnnnnnnnnnnnnnnnnnnnnnnnnnnnnnnnnnnnnnnnnnnnnnnnnnnnnnnnnnnnnnnnnnnnnnnnnnnnnnnnnnnnnnnnnnnnnnnnnnnnnnnnnnnnnnnnnnnnnnnnnnnnnnnnnnnnnnnnnnnnnnnnnnnnnnnnnnnnnnnnnnnnnnnnnnnnnnnnnnnnnnnnnnnnnnnnnnnnnnnnnnnnnnnnnnnnnnnnnnnnnnnnnnnnnnnnnnnnnnnnnnnnnnnnnnnnnnnnnnnnnnnnnnnnnnnnnnnnnnnnnnnnnnnnnnnnnnnnnnnnnnnnnnnnnnnnnnnnnnnnnnnnnnnnnnnnnnnnnnnnnnnnnnnnnnnnnnnnnnnnnnnnnnnnnnnnnnnnnnnnnnnnnnnnnnnnnnnnnnnnnnnnnnnnnnnnnnnnnnnnnnnnnnnnnnnnnnnnnnnnnnnnnnnnnnnnnnnnnnnnnnnnnnnnnnnnnnnnnnnnnnnnnnnnnnnnnnnnnnnnnnnnnnnnnnnnnnnnnnnnnnnnnnnnnnnnnnnnnnnnnnnnnnnnnnnnnnnnnnnnnnnnnnnnnnnnnnnnnnnnnnnnnnnnnnnnnnnnnnnnnnnnnnnnnnnnnnnnnnnnnnnnnnnnnnnnnnnnnnnnnnnnnnnnnnnnnnnnnnnnnnnnnnnnnnnnnnnnnnnnnnnnnnnnnnnnnnnnnnnnnnnnnnnnnnnnnnnnnnnnnnnnnnnnnnnnnnnnnnnnnnnnnnnnnnnnnnnnnnnnnnnnnnnnnnnnnnnnnnnnnnnnnnnnnnnnnnnnnnnnnnnnnnnnnnnnnnnnnnnnnnnnnnnnnnnnnnnnnnnnnnnnnnnnnnnnnnnnnnnnnnnnnnnnnnnnnnnnnnnnnnnnnnnnnnnnnnnnnnnnnnnnnnnnnnnnnnnnnnnnnnnnnnnnnnnnnnnnnnnnnnnnnnnnnnnnnnnnnnnnnnnnnnnnnnnnnnnnnnnnnnnnnnnnnnnnnnnnnnnnnnnnnnnnnnnnnnnnnnnnnnnnnnnnnnnnnnnnnnnnnnnnnnnnnnnnnnnnnnnnnnnnnnnnnnnnnnnnnnnnnnnnnnnnnnnnnnnnnnnnnnnnnnnnnnnnnnnnnnnnnnnnnnnnnnnnnnnnnnnnnnnnnnnnnnnnnnnnnnnnnnnnnnnnnnnnnnnnnnnnnnnnnnnnnnnnnnnnnnnnnnnnnnnnnnnnnnnnnnnnnnnnnnnnnnnnnnnnnnnnnnnnnnnnnnnnnnnnnnnnnnnnnnnnnnnnnnnnnnnnnnnnnnnnnnnnnnnnnnnnnnnnnnnnnnnnnnnnnnnnnnnnnnnnnnnnnnnnnnnnnnnnnnnnnnnnnnnnnnnnnnnnnnnnnnnnnnnnnnnnnnnnnnnnnnnnnnnnnnnnnnnnnnnnnnnnnnnnnnnnnnnnnnnnnnnnnnnnnnnnnnnnnnnnnnnnnnnnnnnnnnnnnnnnnnnnnnnnnnnnnnnnnnnnnnnnnnnnnnnnnnnnnnnnnnnnnnnnnnnnnnnnnnnnnnnnnnnnnnnnnnnnnnnnnnnnnnnnnnnnnnnnnnnnnnnnnnnnnnnnnnnnnnnnnnnnnnnnnnnnnnnnnnnnnnnnnnnnnnnnnnnnnnnnnnnnnnnnnnnnnnnnnnnnnnnnnnnnnnnnnnnnnnnnnnnnnnnnnnnnnnnnnnnnnnnnnnnnnnnnnnnnnnnnnnnnnnnnnnnnnnnnnnnnnnnnnnnnnnnnnnnnnnnnnnnnnnnnnnnnnnnnnnnnnnnnnnnnnnnnnnnnnnnnnnnnnnnnnnnnnnnnnnnnnnnnnnnnnnnnnnnnnnnnnnnnnnnnnnnnnnnnnnnnnnnnnnnnnnnnnnnnnnnnnnnnnnnnnnnnnnnnnnnnnnnnnnnnnnnnnnnnnnnnnnnnnnnnnnnnnnnnnnnnnnnnnnnnnnnnnnnnnnnnnnnnnnnnnnnnnnnnnnnnnnnnnnnnnnnnnnnnnnnnnnnnnnnnnnnnnnnnnnnnnnnnnnnnnnnnnnnnnnnnnnnnnnnnnnnnnnnnnnnnnnnnnnnnnnnnnnnnnnnnnnnnnnnnnnnnnnnnnnnnnnnnnnnnnnnnnnnnnnnnnnnnnnnnnnnnnnnnnnnnnnnnnnnnnnnnnnnnnnnnnnnnnnnnnnnnnnnnnnnnnnnnnnnnnnnnnnnnnnnnnnnnnnnnnnnnnnnnnnnnnnnnnnnnnnnnnnnnnnnnnnnnnnnnnnnnnnnnnnnnnnnnnnnnnnnnnnnnnnnnnnnnnnnnnnnnnnnnnnnnnnnnnnnnnnnnnnnnnnnnnnnnnnnnnnnnnnnnnnnnnnnnnnnnnnnnnnnnnnnnnnnnnnnnnnnnnnnnnnnnnnnnnnnnnnnnnnnnnnnnnnnnnnnnnnnnnnnnnnnnnnnnnnnnnnnnnnnnnnnnnnnnnnnnnnnnnnnnnnnnnnnnnnnnnnnnnnnnnnnnnnnnnnnnnnnnnnnnnnnnnnnnnnnnnnnnnnnnnnnnnnnnnnnnnnnnnnnnnnnnnnnnnnnnnnnnnnnnnnnnnnnnnnnnnnnnnnnnnnnnnnnnnnnnnnnnnnnnnnnnnnnnnnnnnnnnnnnnnnnnnnnnnnnnnnnnnnnnnnnnnnnnnnnnnnnnnnnnnnnnnnnnnnnnnnnnnnnnnnnnnnnnnnnnnnnnnnnnnnnnnnnnnnnnnnnnnnnnnnnnnnnnnnnnnnnnnnnnnnnnnnnnnnnnnnnnnnnnnnnnnnnnnnnnnnnnnnnnnnnnnnnnnnnnnnnnnnnnnnnnnnnnnnnnnnnnnnnnnnnnnnnnnnnnnnnnnnnnnnnnnnnnnnnnnnnnnnnnnnnnnnnnnnnnnnnnnnnnnnnnnnnnnnnnnnnnnnnnnnnnnnnnnnnnnnnnnnnnnnnnnnnnnnnnnnnnnnnnnnnnnnnnnnnnnnnnnnnnnnnnnnnnnnnnnnnnnnnnnnnnnnnnnnnnnnnnnnnnnnnnnnnnnnnnnnnnnnnnnnnnnnnnnnnnnnnnnnnnnnnnnnnnnnnnnnnnnnnnnnnnnnnnnnnnnnnnnnnnnnnnnnnnnnnnnnnnnnnnnnnnnnnnnnnnnnnnnnnnnnnnnnnnnnnnnnnnnnnnnnnnnnnnnnnnnnnnnnnnnnnnnnnnnnnnnnnnnnnnnnnnnnnnnnnnnnnnnnnnnnnnnnnnnnnnnnnnnnnnnnnnnnnnnnnnnnnnnnnnnnnnnnnnnnnnnnnnnnnnnnnnnnnnnnnnnnnnnnnnnnnnnnnnnnnnnnnnnnnnnnnnnnnnnnnnnnnnnnnnnnnnnnnnnnnnnnnnnnnnnnnnnnnnnnnnnnnnnnnnnnnnnnnnnnnnnnnnnnnnnnnnnnnnnnnnnnnnnnnnnnnnnnnnnnnnnnnnnnnnnnnnnnnnnnnnnnnnnnnnnnnnnnnnnnnnnnnnnnnnnnnnnnnnnnnnnnnnnnnnnnnnnnnnnnnnnnnnnnnnnnnnnnnnnnnnnnnnnnnnnnnnnnnnnnnnnnnnnnnnnnnnnnnnnnnnnnnnnnnnnnnnnnnnnnnnnnnnnnnnnnnnnnnnnnnnnnnnnnnnnnnnnnnnnnnnnnnnnnnnnnnnnnnnnnnnnnnnnnnnnnnnnnnnnnnnnnnnnnnnnnnnnnnnnnnnnnnnnnnnnnnnnnnnnnnnnnnnnnnnnnnnnnnnnnnnnnnnnnnnnnnnnnnnnnnnnnnnnnnnnnnnnnnnnnnnnnnnnnnnnnnnnnnnnnnnnnnnnnnnnnnnnnnnnnnnnnnnnnnnnnnnnnnnnnnnnnnnnnnnnnnnnnnnnnnnnnnnnnnnnnnnnnnnnnnnnnnnnnnnnnnnnnnnnnnnnnnnnnnnnnnnnnnnnnnnnnnnnnnnnnnnnnnnnnnnnnnnnnnnnnnnnnnnnnnnnnnnnnnnnnnnnnnnnnnnnnnnnnnnnnnnnnnnnnnnnnnnnnnnnnnnnnnnnnnnnnnnnnnnnnnnnnnnnnnnnnnnnnnnnnnnnnnnnnnnnnnnnnnnnnnnnnnnnnnnnnnnnnnnnnnnnnnnnnnnnnnnnnnnnnnnnnnnnnnnnnnnnnnnnnnnnnnnnnnnnnnnnnnnnnnnnnnnnnnnnnnnnnnnnnnnnnnnnnnnnnnnnnnnnnnnnnnnnnnnnnnnnnnnnnnnnnnnnnnnnnnnnnnnnnnnnnnnnnnnnnnnnnnnnnnnnnnnnnnnnnnnnnnnnnnnnnnnnnnnnnnnnnnnnnnnnnnnnnnnnnnnnnnnnnnnnnnnnnnnnnnnnnnnnnnnnnnnnnnnnnnnnnnnnnnnnnnnnnnnnnnnnnnnnnnnnnnnnnnnnnnnnnnnnnnnnnnnnnnnnnnnnnnnnnnnnnnnnnnnnnnnnnnnnnnnnnnnnnnnnnnnnnnnnnnnnnnnnnnnnnnnnnnnnnnnnnnnnnnnnnnnnnnnnnnnnnnnnnnnnnnnnnnnnnnnnnnnnnnnnnnnnnnnnnnnnnnnnnnnnnnnnnnnnnnnnnnnnnnnnnnnnnnnnnnnnnnnnnnnnnnnnnnnnnnnnnnnnnnnnnnnnnnnnnnnnnnnnnnnnnnnnnnnnnnnnnnnnnnnnnnnnnnnnnnnnnnnnnnnnnnnnnnnnnnnnnnnnnnnnnnnnnnnnnnnnnnnnnnnnnnnnnnnnnnnnnnnnnnnnnnnnnnnnnnnnnnnnnnnnnnnnnnnnnnnnnnnnnnnnnnnnnnnnnnnnnnnnnnnnnnnnnnnnnnnnnnnnnnnnnnnnnnnnnnnnnnnnnnnnnnnnnnnnnnnnnnnnnnnnnnnnnnnnnnnnnnnnnnnnnnnnnnnnnnnnnnnnnnnnnnnnnnnnnnnnnnnnnnnnnnnnnnnnnnnnnnnnnnnnnnnnnnnnnnnnnnnnnnnnnnnnnnnnnnnnnnnnnnnnnnnnnnnnnnnnnnnnnnnnnnnnnnnnnnnnnnnnnnnnnnnnnnnnnnnnnnnnnnnnnnnnnnnnnnnnnnnnnnnnnnnnnnnnnnnnnnnnnnnnnnnnnnnnnnnnnnnnnnnnnnnnnnnnnnnnnnnnnnnnnnnnnnnnnnnnnnnnnnnnnnnnnnnnnnnnnnnnnnnnnnnnnnnnnnnnnnnnnnnnnnnnnnnnnnnnnnnnnnnnnnnnnnnnnnnnnnnnnnnnnnnnnnnnnnnnnnnnnnnnnnnnnnnnnnnnnnnnnnnnnnnnnnnnnnnnnnnnnnnnnnnnnnnnnnnnnnnnnnnnnnnnnnnnnnnnnnnnnnnnnnnnnnnnnnnnnnnnnnnnnnnnnnnnnnnnnnnnnnnnnnnnnnnnnnnnnnnnnnnnnnnnnnnnnnnnnnnnnnnnnnnnnnnnnnnnnnnnnnnnnnnnnnnnnnnnnnnnnnnnnnnnnnnnnnnnnnnnnnnnnnnnnnnnnnnnnnnnnnnnnnnnnnnnnnnnnnnnnnnnnnnnnnnnnnnnnnnnnnnnnnnnnnnnnnnnnnnnnnnnnnnnnnnnnnnnnnnnnnnnnnnnnnnnnnnnnnnnnnnnnnnnnnnnnnnnnnnnnnnnnnnnnnnnnnnnnnnnnnnnnnnnnnnnnnnnnnnnnnnnnnnnnnnnnnnnnnnnnnnnnnnnnnnnnnnnnnnnnnnnnnnnnnnnnnnnnnnnnnnnnnnnnnnnnnnnnnnnnnnnnnnnnnnnnnnnnnnnnnnnnnnnnnnnnnnnnnnnnnnnnnnnnnnnnnnnnnnnnnnnnnnnnnnnnnnnnnnnnnnnnnnnnnnnnnnnnnnnnnnnnnnnnnnnnnnnnnnnnnnnnnnnnnnnnnnnnnnnnnnnnnnnnnnnnnnnnnnnnnnnnnnnnnnnnnnnnnnnnnnnnnnnnnnnnnnnnnnnnnnnnnnnnnnnnnnnnnnnnnnnnnnnnnnnnnnnnnnnnnnnnnnnnnnnnnnnnnnnnnnnnnnnnnnnnnnnnnnnnnnnnnnnnnnnnnnnnnnnnnnnnnnnnnnnnnnnnnnnnnnnnnnnnnnnnnnnnnnnnnnnnnnnnnnnnnnnnnnnnnnnnnnnnnnnnnnnnnnnnnnnnnnnnnnnnnnnnnnnnnnnnnnnnnnnnnnnnnnnnnnnnnnnnnnnnnnnnnnnnnnnnnnnnnnnnnnnnnnnnnnnnnnnnnnnnnnnnnnnnnnnnnnnnnnnnnnnnnnnnnnnnnnnnnnnnnnnnnnnnnnnnnnnnnnnnnnnnnnnnnnnnnnnnnnnnnnnnnnnnnnnnnnnnnnnnnnnnnnnnnnnnnnnnnnnnnnnnnnnnnnnnnnnnnnnnnnnnnnnnnnnnnnnnnnnnnnnnnnnnnnnnnnnnnnnnnnnnnnnnnnnnnnnnnnnnnnnnnnnnnnnnnnnnnnnnnnnnnnnnnnnnnnnnnnnnnnnnnnnnnnnnnnnnnnnnnnnnnnnnnnnnnnnnnnnnnnnnnnnnnnnnnnnnnnnnnnnnnnnnnnnnnnnnnnnnnnnnnnnnnnnnnnnnnnnnnnnnnnnnnnnnnnnnnnnnnnnnnnnnnnnnnnnnnnnnnnnnnnnnnnnnnnnnnnnnnnnnnnnnnnnnnnnnnnnnnnnnnnnnnnnnnnnnnnnnnnnnnnnnnnnnnnnnnnnnnnnnnnnnnnnnnnnnnnnnnnnnnnnnnnnnnnnnnnnnnnnnnnnnnnnnnnnnnnnnnnnnnnnnnnnnnnnnnnnnnnnnnnnnnnnnnnnnnnnnnnnnnnnnnnnnnnnnnnnnnnnnnnnnnnnnnnnnnnnnnnnnnnnnnnnnnnnnnnnnnnnnnnnnnnnnnnnnnnnnnnnnnnnnnnnnnnnnnnnnnnnnnnnnnnnnnnnnnnnnnnnnnnnnnnnnnnnnnnnnnnnnnnnnnnnnnnnnnnnnnnnnnnnnnnnnnnnnnnnnnnnnnnnnnnnnnnnnnnnnnnnnnnnnnnnnnnnnnnnnnnnnnnnnnnnnnnnnnnnnnnnnnnnnnnnnnnnnnnnnnnnnnnnnnnnnnnnnnnnnnnnnnnnnnnnnnnnnnnnnnnnnnnnnnnnnnnnnnnnnnnnnnnnnnnnnnnnnnnnnnnnnnnnnnnnnnnnnnnnnnnnnnnnnnnnnnnnnnnnnnnnnnnnnnnnnnnnnnnnnnnnnnnnnnnnnnnnnnnnnnnnnnnnnnnnnnnnnnnnnnnnnnnnnnnnnnnnnnnnnnnnnnnnnnnnnnnnnnnnnnnnnnnnnnnnnnnnnnnnnnnnnnnnnnnnnnnnnnnnnnnnnnnnnnnnnnnnnnnnnnnnnnnnnnnnnnnnnnnnnnnnnnnnnnnnnnnnnnnnnnnnnnnnnnnnnnnnnnnnnnnnnnnnnnnnnnnnnnnnnnnnnnnnnnnnnnnnnnnnnnnnnnnnnnnnnnnnnnnnnnnnnnnnnnnnnnnnnnnnnnnnnnnnnnnnnnnnnnnnnnnnnnnnnnnnnnnnnnnnnnnnnnnnnnnnnnnnnnnnnnnnnnnnnnnnnnnnnnnnnnnnnnnnnnnnnnnnnnnnnnnnnnnnnnnnnnnnnnnnnnnnnnnnnnnnnnnnnnnnnnnnnnnnnnnnnnnnnnnnnnnnnnnnnnnnnnnnnnnnnnnnnnnnnnnnnnnnnnnnnnnnnnnnnnnnnnnnnnnnnnnnnnnnnnnnnnnnnnnnnnnnnnnnnnnnnnnnnnnnnnnnnnnnnnnnnnnnnnnnnnnnnnnnnnnnnnnnnnnnnnnnnnnnnnnnnnnnnnnnnnnnnnnnnnnnnnnnnnnnnnnnnnnnnnnnnnnnnnnnnnnnnnnnnnnnnnnnnnnnnnnnnnnnnnnnnnnnnnnnnnnnnnnnnnnnnnnnnnnnnnnnnnnnnnnnnnnnnnnnnnnnnnnnnnnnnnnnnnnnnnnnnnnnnnnnnnnnnnnnnnnnnnnnnnnnnnnnnnnnnnnnnnnnnnnnnnnnnnnnnnnnnnnnnnnnnnnnnnnnnnnnnnnnnnnnnnnnnnnnnnnnnnnnnnnnnnnnnnnnnnnnnnnnnnnnnnnnnnnnnnnnnnnnnnnnnnnnnnnnnnnnnnnnnnnnnnnnnnnnnnnnnnnnnnnnnnnnnnnnnnnnnnnnnnnnnnnnnnnnnnnnnnnnnnnnnnnnnnnnnnnnnnnnnnnnnnnnnnnnnnnnnnnnnnnnnnnnnnnnnnnnnnnnnnnnnnnnnnnnnnnnnnnnnnnnnnnnnnnnnnnnnnnnnnnnnnnnnnnnnnnnnnnnnnnnnnnnnnnnnnnnnnnnnnnnnnnnnnnnnnnnnnnnnnnnnnnnnnnnnnnnnnnnnnnnnnnnnnnnnnnnnnnnnnnnnnnnnnnnnnnnnnnnnnnnnnnnnnnnnnnnnnnnnnnnnnnnnnnnnnnnnnnnnnnnnnnnnnnnnnnnnnnnnnnnnnnnnnnnnnnnnnnnnnnnnnnnnnnnnnnnnnnnnnnnnnnnnnnnnnnnnnnnnnnnnnnnnnnnnnnnnnnnnnnnnnnnnnnnnnnnnnnnnnnnnnnnnnnnnnnnnnnnnnnnnnnnnnnnnnnnnnnnnnnnnnnnnnnnnnnnnnnnnnnnnnnnnnnnnnnnnnnnnnnnnnnnnnnnnnnnnnnnnnnnnnnnnnnnnnnnnnnnnnnnnnnnnnnnnnnnnnnnnnnnnnnnnnnnnnnnnnnnnnnnnnnnnnnnnnnnnnnnnnnnnnnnnnnnnnnnnnnnnnnnnnnnnnnnnnnnnnnnnnnnnnnnnnnnnnnnnnnnnnnnnnnnnnnnnnnnnnnnnnnnnnnnnnnnnnnnnnnnnnnnnnnnnnnnnnnnnnnnnnnnnnnnnnnnnnnnnnnnnnnnnnnnnnnnnnnnnnnnnnnnnnnnnnnnnnnnnnnnnnnnnnnnnnnnnnnnnnnnnnnnnnnnnnnnnnnnnnnnnnnnnnnnnnnnnnnnnnnnnnnnnnnnnnnnnnnnnnnnnnnnnnnnnnnnnnnnnnnnnnnnnnnnnnnnnnnnnnnnnnnnnnnnnnnnnnnnnnnnnnnnnnnnnnnnnnnnnnnnnnnnnnnnnnnnnnnnnnnnnnnnnnnnnnnnnnnnnnnnnnnnnnnnnnnnnnnnnnnnnnnnnnnnnnnnnnnnnnnnnnnnnnnnnnnnnnnnnnnnnnnnnnnnnnnnnnnnnnnnnnnnnnnnnnnnnnnnnnnnnnnnnnnnnnnnnnnnnnnnnnnnnnnnnnnnnnnnnnnnnnnnnnnnnnnnnnnnnnnnnnnnnnnnnnnnnnnnnnnnnnnnnnnnnnnnnnnnnnnnnnnnnnnnnnnnnnnnnnnnnnnnnnnnnnnnnnnnnnnnnnnnnnnnnnnnnnnnnnnnnnnnnnnnnnnnnnnnnnnnnnnnnnnnnnnnnnnnnnnnnnnnnnnnnnnnnnnnnnnnnnnnnnnnnnnnnnnnnnnnnnnnnnnnnnnnnnnnnnnnnnnnnnnnnnnnnnnnnnnnnnnnnnnnnnnnnnnnnnnnnnnnnnnnnnnnnnnnnnnnnnnnnnnnnnnnnnnnnnnnnnnnnnnnnnnnnnnnnnnnnnnnnnnnnnnnnnnnnnnnnnnnnnnnnnnnnnnnnnnnnnnnnnnnnnnnnnnnnnnnnnnnnnnnnnnnnnnnnnnnnnnnnnnnnnnnnnnnnnnnnnnnnnnnnnnnnnnnnnnnnnnnnnnnnnnnnnnnnnnnnnnnnnnnnnnnnnnnnnnnnnnnnnnnnnnnnnnnnnnnnnnnnnnnnnnnnnnnnnnnnnnnnnnnnnnnnnnnnnnnnnnnnnnnnnnnnnnnnnnnnnnnnnnnnnnnnnnnnnnnnnnnnnnnnnnnnnnnnnnnnnnnnnnnnnnnnnnnnnnnnnnnnnnnnnnnnnnnnnnnnnnnnnnnnnnnnnnnnnnnnnnnnnnnnnnnnnnnnnnnnnnnnnnnnnnnnnnnnnnnnnnnnnnnnnnnnnnnnnnnnnnnnnnnnnnnnnnnnnnnnnnnnnnnnnnnnnnnnnnnnnnnnnnnnnnnnnnnnnnnnnnnnnnnnnnnnnnnnnnnnnnnnnnnnnnnnnnnnnnnnnnnnnnnnnnnnnnnnnnnnnnnnnnnnnnnnnnnnnnnnnnnnnnnnnnnnnnnnnnnnnnnnnnnnnnnnnnnnnnnnnnnnnnnnnnnnnnnnnnnnnnnnnnnnnnnnnnnnnnnnnnnnnnnnnnnnnnnnnnnnnnnnnnnnnnnnnnnnnnnnnnnnnnnnnnnnnnnnnnnnnnnnnnnnnnnnnnnnnnnnnnnnnnnnnnnnnnnnnnnnnnnnnnnnnnnnnnnnnnnnnnnnnnnnnnnnnnnnnnnnnnnnnnnnnnnnnnnnnnnnnnnnnnnnnnnnnnnnnnnnnnnnnnnnnnnnnnnnnnnnnnnnnnnnnnnnnnnnnnnnnnnnnnnnnnnnnnnnnnnnnnnnnnnnnnnnnnnnnnnnnnnnnnnnnnnnnnnnnnnnnnnnnnnnnnnnnnnnnnnnnnnnnnnnnnnnnnnnnnnnnnnnnnnnnnnnnnnnnnnnnnnnnnnnnnnnnnnnnnnnnnnnnnnnnnnnnnnnnnnnnnnnnnnnnnnnnnnnnnnnnnnnnnnnnnnnnnnnnnnnnnnnnnnnnnnnnnnnnnnnnnnnnnnnnnnnnnnnnnnnnnnnnnnnnnnnnnnnnnnnnnnnnnnnnnnnnnnnnnnnnnnnnnnnnnnnnnnnnnnnnnnnnnnnnnnnnnnnnnnnnnnnnnnnnnnnnnnnnnnnnnnnnnnnnnnnnnnnnnnnnnnnnnnnnnnnnnnnnnnnnnnnnnnnnnnnnnnnnnnnnnnnnnnnnnnnnnnnnnnnnnnnnnnnnnnnnnnnnnnnnnnnnnnnnnnnnnnnnnnnnnnnnnnnnnnnnnnnnnnnnnnnnnnnnnnnnnnnnnnnnnnnnnnnnnnnnnnnnnnnnnnnnnnnnnnnnnnnnnnnnnnnnnnnnnnnnnnnnnnnnnnnnnnnnnnnnnnnnnnnnnnnnnnnnnnnnnnnnnnnnnnnnnnnnnnnnnnnnnnnnnnnnnnnnnnnnnnnnnnnnnnnnnnnnnnnnnnnnnnnnnnnnnnnnnnnnnnnnnnnnnnnnnnnnnnnnnnnnnnnnnnnnnnnnnnnnnnnnnnnnnnnnnnnnnnnnnnnnnnnnnnnnnnnnnnnnnnnnnnnnnnnnnnnnnnnnnnnnnnnnnnnnnnnnnnnnnnnnnnnnnnnnnnnnnnnnnnnnnnnnnnnnnnnnnnnnnnnnnnnnnnnnnnnnnnnnnnnnnnnnnnnnnnnnnnnnnnnnnnnnnnnnnnnnnnnnnnnnnnnnnnnnnnnnnnnnnnnnnnnnnnnnnnnnnnnnnnnnnnnnnnnnnnnnnnnnnnnnnnnnnnnnnnnnnnnnnnnnnnnnnnnnnnnnnnnnnnnnnnnnnnnnnnnnnnnnnnnnnnnnnnnnnnnnnnnnnnnnnnnnnnnnnnnnnnnnnnnnnnnnnnnnnnnnnnnnnnnnnnnnnnnnnnnnnnnnnnnnnnnnnnnnnnnnnnnnnnnnnnnnnnnnnnnnnnnnnnnnnnnnnnnnnnnnnnnnnnnnnnnnnnnnnnnnnnnnnnnnnnnnnnnnnnnnnnnnnnnnnnnnnnnnnnnnnnnnnnnnnnnnnnnnnnnnnnnnnnnnnnnnnnnnnnnnnnnnnnnnnnnnnnnnnnnnnnnnnnnnnnnnnnnnnnnnnnnnnnnnnnnnnnnnnnnnnnnnnnnnnnnnnnnnnnnnnnnnnnnnnnnnnnnnnnnnnnnnnnnnnnnnnnnnnnnnnnnnnnnnnnnnnnnnnnnnnnnnnnnnnnnnnnnnnnnnnnnnnnnnnnnnnnnnnnnnnnnnnnnnnnnnnnnnnnnnnnnnnnnnnnnnnnnnnnnnnnnnnnnnnnnnnnnnnnnnnnnnnnnnnnnnnnnnnnnnnnnnnnnnnnnnnnnnnnnnnnnnnnnnnnnnnnnnnnnnnnnnnnnnnnnnnnnnnnnnnnnnnnnnnnnnnnnnnnnnnnnnnnnnnnnnnnnnnnnnnnnnnnnnnnnnnnnnnnnnnnnnnnnnnnnnnnnnnnnnnnnnnnnnnnnnnnnnnnnnnnnnnnnnnnnnnnnnnnnnnnnnnnnnnnnnnnnnnnnnnnnnnnnnnnnnnnnnnnnnnnnnnnnnnnnnnnnnnnnnnnnnnnnnnnnnnnnnnnnnnnnnnnnnnnnnnnnnnnnnnnnnnnnnnnnnnnnnnnnnnnnnnnnnnnnnnnnnnnnnnnnnnnnnnnnnnnnnnnnnnnnnnnnnnnnnnnnnnnnnnnnnnnnnnnnnnnnnnnnnnnnnnnnnnnnnnnnnnnnnnnnnnnnnnnnnnnnnnnnnnnnnnnnnnnnnnnnnnnnnnnnnnnnnnnnnnnnnnnnnnnnnnnnnnnnnnnnnnnnnnnnnnnnnnnnnnnnnnnnnnnnnnnnnnnnnnnnnnnnnnnnnnnnnnnnnnnnnnnnnnnnnnnnnnnnnnnnnnnnnnnnnnnnnnnnnnnnnnnnnnnnnnnnnnnnnnnnnnnnnnnnnnnnnnnnnnnnnnnnnnnnnnnnnnnnnnnnnnnnnnnnnnnnnnnnnnnnnnnnnnnnnnnnnnnnnnnnnnnnnnnnnnnnnnnnnnnnnnnnnnnnnnnnnnnnnnnnnnnnnnnnnnnnnnnnnnnnnnnnnnnnnnnnnnnnnnnnnnnnnnnnnnnnnnnnnnnnnnnnnnnnnnnnnnnnnnnnnnnnnnnnnnnnnnnnnnnnnnnnnnnnnnnnnnnnnnnnnnnnnnnnnnnnnnnnnnnnnnnnnnnnnnnnnnnnnnnnnnnnnnnnnnnnnnnnnnnnnnnnnnnnnnnnnnnnnnnnnnnnnnnnnnnnnnnnnnnnnnnnnnnnnnnnnnnnnnnnnnnnnnnnnnnnnnnnnnnnnnnnnnnnnnnnnnnnnnnnnnnnnnnnnnnnnnnnnnnnnnnnnnnnnnnnnnnnnnnnnnnnnnnnnnnnnnnnnnnnnnnnnnnnnnnnnnnnnnnnnnnnnnnnnnnnnnnnnnnnnnnnnnnnnnnnnnnnnnnnnnnnnnnnnnnnnnnnnnnnnnnnnnnnnnnnnnnnnnnnnnnnnnnnnnnnnnnnnnnnnnnnnnnnnnnnnnnnnnnnnnnnnnnnnnnnnnnnnnnnnnnnnnnnnnnnnnnnnnnnnnnnnnnnnnnnnnnnnnnnnnnnnnnnnnnnnnnnnnnnnnnnnnnnnnnnnnnnnnnnnnnnnnnnnnnnnnnnnnnnnnnnnnnnnnnnnnnnnnnnnnnnnnnnnnnnnnnnnnnnnnnnnnnnnnnnnnnnnnnnnnnnnnnnnnnnnnnnnnnnnnnnnnnnnnnnnnnnnnnnnnnnnnnnnnnnnnnnnnnnnnnnnnnnnnnnnnnnnnnnnnnnnnnnnnnnnnnnnnnnnnnnnnnnnnnnnnnnnnnnnnnnnnnnnnnnnnnnnnnnnnnnnnnnnnnnnnnnnnnnnnnnnnnnnnnnnnnnnnnnnnnnnnnnnnnnnnnnnnnnnnnnnnnnnnnnnnnnnnnnnnnnnnnnnnnnnnnnnnnnnnnnnnnnnnnnnnnnnnnnnnnnnnnnnnnnnnnnnnnnnnnnnnnnnnnnnnnnnnnnnnnnnnnnnnnnnnnnnnnnnnnnnnnnnnnnnnnnnnnnnnnnnnnnnnnnnnnnnnnnnnnnnnnnnnnnnnnnnnnnnnnnnnnnnnnnnnnnnnnnnnnnnnnnnnnnnnnnnnnnnnnnnnnnnnnnnnnnnnnnnnnnnnnnnnnnnnnnnnnnnnnnnnnnnnnnnnnnnnnnnnnnnnnnnnnnnnnnnnnnnnnnnnnnnnnnnnnnnnnnnnnnnnnnnnnnnnnnnnnnnnnnnnnnnnnnnnnnnnnnnnnnnnnnnnnnnnnnnnnnnnnnnnnnnnnnnnnnnnnnnnnnnnnnnnnnnnnnnnnnnnnnnnnnnnnnnnnnnnnnnnnnnnnnnnnnnnnnnnnnnnnnnnnnnnnnnnnnnnnnnnnnnnnnnnnnnnnnnnnnnnnnnnnnnnnnnnnnnnnnnnnnnnnnnnnnnnnnnnnnnnnnnnnnnnnnnnnnnnnnnnnnnnnnnnnnnnnnnnnnnnnnnnnnnnnnnnnnnnnnnnnnnnnnnnnnnnnnnnnnnnnnnnnnnnnnnnnnnnnnnnnnnnnnnnnnnnnnnnnnnnnnnnnnnnnnnnnnnnnnnnnnnnnnnnnnnnnnnnnnnnnnnnnnnnnnnnnnnnnnnnnnnnnnnnnnnnnnnnnnnnnnnnnnnnnnnnnnnnnnnnnnnnnnnnnnnnnnnnnnnnnnnnnnnnnnnnnnnnnnnnnnnnnnnnnnnnnnnnnnnnnnnnnnnnnnnnnnnnnnnnnnnnnnnnnnnnnnnnnnnnnnnnnnnnnnnnnnnnnnnnnnnnnnnnnnnnnnnnnnnnnnnnnnnnnnnnnnnnnnnnnnnnnnnnnnnnnnnnnnnnnnnnnnnnnnnnnnnnnnnnnnnnnnnnnnnnnnnnnnnnnnnnnnnnnnnnnnnnnnnnnnnnnnnnnnnnnnnnnnnnnnnnnnnnnnnnnnnnnnnnnnnnnnnnnnnnnnnnnnnnnnnnnnnnnnnnnnnnnnnnnnnnnnnnnnnnnnnnnnnnnnnnnnnnnnnnnnnnnnnnnnnnnnnnnnnnnnnnnnnnnnnnnnnnnnnnnnnnnnnnnnnnnnnnnnnnnnnnnnnnnnnnnnnnnnnnnnnnnnnnnnnnnnnnnnnnnnnnnnnnnnnnnnnnnnnnnnnnnnnnnnnnnnnnnnnnnnnnnnnnnnnnnnnnnnnnnnnnnnnnnnnnnnnnnnnnnnnnnnnnnnnnnnnnnnnnnnnnnnnnnnnnnnnnnnnnnnnnnnnnnnnnnnnnnnnnnnnnnnnnnnnnnnnnnnnnnnnnnnnnnnnnnnnnnnnnnnnnnnnnnnnnnnnnnnnnnnnnnnnnnnnnnnnnnnnnnnnnnnnnnnnnnnnnnnnnnnnnnnnnnnnnnnnnnnnnnnnnnnnnnnnnnnnnnnnnnnnnnnnnnnnnnnnnnnnnnnnnnnnnnnnnnnnnnnnnnnnnnnnnnnnnnnnnnnnnnnnnnnnnnnnnnnnnnnnnnnnnnnnnnnnnnnnnnnnnnnnnnnnnnnnnnnnnnnnnnnnnnnnnnnnnnnnnnnnnnnnnnnnnnnnnnnnnnnnnnnnnnnnnnnnnnnnnnnnnnnnnnnnnnnnnnnnnnnnnnnnnnnnnnnnnnnnnnnnnnnnnnnnnnnnnnnnnnnnnnnnnnnnnnnnnnnnnnnnnnnnnnnnnnnnnnnnnnnnnnnnnnnnnnnnnnnnnnnnnnnnnnnnnnnnnnnnnnnnnnnnnnnnnnnnnnnnnnnnnnnnnnnnnnnnnnnnnnnnnnnnnnnnnnnnnnnnnnnnnnnnnnnnnnnnnnnnnnnnnnnnnnnnnnnnnnnnnnnnnnnnnnnnnnnnnnnnnnnnnnnnnnnnnnnnnnnnnnnnnnnnnnnnnnnnnnnnnnnnnnnnnnnnnnnnnnnnnnnnnnnnnnnnnnnnnnnnnnnnnnnnnnnnnnnnnnnnnnnnnnnnnnnnnnnnnnnnnnnnnnnnnnnnnnnnnnnnnnnnnnnnnnnnnnnnnnnnnnnnnnnnnnnnnnnnnnnnnnnnnnnnnnnnnnnnnnnnnnnnnnnnnnnnnnnnnnnnnnnnnnnnnnnnnnnnnnnnnnnnnnnnnnnnnnnnnnnnnnnnnnnnnnnnnnnnnnnnnnnnnnnnnnnnnnnnnnnnnnnnnnnnnnnnnnnnnnnnnnnnnnnnnnnnnnnnnnnnnnnnnnnnnnnnnnnnnnnnnnnnnnnnnnnnnnnnnnnnnnnnnnnnnnnnnnnnnnnnnnnnnnnnnnnnnnnnnnnnnnnnnnnnnnnnnnnnnnnnnnnnnnnnnnnnnnnnnnnnnnnnnnnnnnnnnnnnnnnnnnnnnnnnnnnnnnnnnnnnnnnnnnnnnnnnnnnnnnnnnnnnnnnnnnnnnnnnnnnnnnnnnnnnnnnnnnnnnnnnnnnnnnnnnnnnnnnnnnnnnnnnnnnnnnnnnnnnnnnnnnnnnnnnnnnnnnnnnnnnnnnnnnnnnnnnnnnnnnnnnnnnnnnnnnnnnnnnnnnnnnnnnnnnnnnnnnnnnnnnnnnnnnnnnnnnnnnnnnnnnnnnnnnnnnnnnnnnnnnnnnnnnnnnnnnnnnnnnnnnnnnnnnnnnnnnnnnnnnnnnnnnnnnnnnnnnnnnnnnnnnnnnnnnnnnnnnnnnnnnnnnnnnnnnnnnnnnnnnnnnnnnnnnnnnnnnnnnnnnnnnnnnnnnnnnnnnnnnnnnnnnnnnnnnnnnnnnnnnnnnnnnnnnnnnnnnnnnnnnnnnnnnnnnnnnnnnnnnnnnnnnnnnnnnnnnnnnnnnnnnnnnnnnnnnnnnnnnnnnnnnnnnnnnnnnnnnnnnnnnnnnnnnnnnnnnnnnnnnnnnnnnnnnnnnnnnnnnnnnnnnnnnnnnnnnnnnnnnnnnnnnnnnnnnnnnnnnnnnnnnnnnnnnnnnnnnnnnnnnnnnnnnnnnnnnnnnnnnnnnnnnnnnnnnnnnnnnnnnnnnnnnnnnnnnnnnnnnnnnnnnnnnnnnnnnnnnnnnnnnnnnnnnnnnnnnnnnnnnnnnnnnnnnnnnnnnnnnnnnnnnnnnnnnnnnnnnnnnnnnnnnnnnnnnnnnnnnnnnnnnnnnnnnnnnnnnnnnnnnnnnnnnnnnnnnnnnnnnnnnnnnnnnnnnnnnnnnnnnnnnnnnnnnnnnnnnnnnnnnnnnnnnnnnnnnnnnnnnnnnnnnnnnnnnnnnnnnnnnnnnnnnnnnnnnnnnnnnnnnnnnnnnnnnnnnnnnnnnnnnnnnnnnnnnnnnnnnnnnnnnnnnnnnnnnnnnnnnnnnnnnnnnnnnnnnnnnnnnnnnnnnnnnnnnnnnnnnnnnnnnnnnnnnnnnnnnnnnnnnnnnnnnnnnnnnnnnnnnnnnnnnnnnnnnnnnnnnnnnnnnnnnnnnnnnnnnnnnnnnnnnnnnnnnnnnnnnnnnnnnnnnnnnnnnnnnnnnnnnnnnnnnnnnnnnnnnnnnnnnnnnnnnnnnnnnnnnnnnnnnnnnnnnnnnnnnnnnnnnnnnnnnnnnnnnnnnnnnnnnnnnnnnnnnnnnnnnnnnnnnnnnnnnnnnnnnnnnnnnnnnnnnnnnnnnnnnnnnnnnnnnnnnnnnnnnnnnnnnnnnnnnnnnnnnnnnnnnnnnnnnnnnnnnnnnnnnnnnnnnnnnnnnnnnnnnnnnnnnnnnnnnnnnnnnnnnnnnnnnnnnnnnnnnnnnnnnnnnnnnnnnnnnnnnnnnnnnnnnnnnnnnnnnnnnnnnnnnnnnnnnnnnnnnnnnnnnnnnnnnnnnnnnnnnnnnnnnnnnnnnnnnnnnnnnnnnnnnnnnnnnnnnnnnnnnnnnnnnnnnnnnnnnnnnnnnnnnnnnnnnnnnnnnnnnnnnnnnnnnnnnnnnnnnnnnnnnnnnnnnnnnnnnnnnnnnnnnnnnnnnnnnnnnnnnnnnnnnnnnnnnnnnnnnnnnnnnnnnnnnnnnnnnnnnnnnnnnnnnnnnnnnnnnnnnnnnnnnnnnnnnnnnnnnnnnnnnnnnnnnnnnnnnnnnnnnnnnnnnnnnnnnnnnnnnnnnnnnnnnnnnnnnnnnnnnnnnnnnnnnnnnnnnnnnnnnnnnnnnnnnnnnnnnnnnnnnnnnnnnnnnnnnnnnnnnnnnnnnnnnnnnnnnnnnnnnnnnnnnnnnnnnnnnnnnnnnnnnnnnnnnnnnnnnnnnnnnnnnnnnnnnnnnnnnnnnnnnnnnnnnnnnnnnnnnnnnnnnnnnnnnnnnnnnnnnnnnnnnnnnnnnnnnnnnnnnnnnnnnnnnnnnnnnnnnnnnnnnnnnnnnnnnnnnnnnnnnnnnnnnnnnnnnnnnnnnnnnnnnnnnnnnnnnnnnnnnnnnnnnnnnnnnnnnnnnnnnnnnnnnnnnnnnnnnnnnnnnnnnnnnnnnnnnnnnnnnnnnnnnnnnnnnnnnnnnnnnnnnnnnnnnnnnnnnnnnnnnnnnnnnnnnnnnnnnnnnnnnnnnnnnnnnnnnnnnnnnnnnnnnnnnnnnnnnnnnnnnnnnnnnnnnnnnnnnnnnnnnnnnnnnnnnnnnnnnnnnnnnnnnnnnnnnnnnnnnnnnnnnnnnnnnnnnnnnnnnnnnnnnnnnnnnnnnnnnnnnnnnnnnnnnnnnnnnnnnnnnnnnnnnnnnnnnnnnnnnnnnnnnnnnnnnnnnnnnnnnnnnnnnnnnnnnnnnnnnnnnnnnnnnnnnnnnnnnnnnnnnnnnnnnnnnnnnnnnnnnnnnnnnnnnnnnnnnnnnnnnnnnnnnnnnnnnnnnnnnnnnnnnnnnnnnnnnnnnnnnnnnnnnnnnnnnnnnnnnnnnnnnnnnnnnnnnnnnnnnnnnnnnnnnnnnnnnnnnnnnnnnnnnnnnnnnnnnnnnnnnnnnnnnnnnnnnnnnnnnnnnnnnnnnnnnnnnnnnnnnnnnnnnnnnnnnnnnnnnnnnnnnnnnnnnnnnnnnnnnnnnnnnnnnnnnnnnnnnnnnnnnnnnnnnnnnnnnnnnnnnnnnnnnnnnnnnnnnnnnnnnnnnnnnnnnnnnnnnnnnnnnnnnnnnnnnnnnnnnnnnnnnnnnnnnnnnnnnnnnnnnnnnnnnnnnnnnnnnnnnnnnnnnnnnnnnnnnnnnnnnnnnnnnnnnnnnnnnnnnnnnnnnnnnnnnnnnnnnnnnnnnnnnnnnnnnnnnnnnnnnnnnnnnnnnnnnnnnnnnnnnnnnnnnnnnnnnnnnnnnnnnnnnnnnnnnnnnnnnnnnnnnnnnnnnnnnnnnnnnnnnnnnnnnnnnnnnnnnnnnnnnnnnnnnnnnnnnnnnnnnnnnnnnnnnnnnnnnnnnnnnnnnnnnnnnnnnnnnnnnnnnnnnnnnnnnnnnnnnnnnnnnnnnnnnnnnnnnnnnnnnnnnnnnnnnnnnnnnnnnnnnnnnnnnnnnnnnnnnnnnnnnnnnnnnnnnnnnnnnnnnnnnnnnnnnnnnnnnnnnnnnnnnnnnnnnnnnnnnnnnnnnnnnnnnnnnnnnnnnnnnnnnnnnnnnnnnnnnnnnnnnnnnnnnnnnnnnnnnnnnnnnnnnnnnnnnnnnnnnnnnnnnnnnnnnnnnnnnnnnnnnnnnnnnnnnnnnnnnnnnnnnnnnnnnnnnnnnnnnnnnnnnnnnnnnnnnnnnnnnnnnnnnnnnnnnnnnnnnnnnnnnnnnnnnnnnnnnnnnnnnnnnnnnnnnnnnnnnnnnnnnnnnnnnnnnnnnnnnnnnnnnnnnnnnnnnnnnnnnnnnnnnnnnnnnnnnnnnnnnnnnnnnnnnnnnnnnnnnnnnnnnnnnnnnnnnnnnnnnnnnnnnnnnnnnnnnnnnnnnnnnnnnnnnnnnnnnnnnnnnnnnnnnnnnnnnnnnnnnnnnnnnnnnnnnnnnnnnnnnnnnnnnnnnnnnnnnnnnnnnnnnnnnnnnnnnnnnnnnnnnnnnnnnnnnnnnnnnnnnnnnnnnnnnnnnnnnnnnnnnnnnnnnnnnnnnnnnnnnnnnnnnnnnnnnnnnnnnnnnnnnnnnnnnnnnnnnnnnnnnnnnnnnnnnnnnnnnnnnnnnnnnnnnnnnnnnnnnnnnnnnnnnnnnnnnnnnnnnnnnnnnnnnnnnnnnnnnnnnnnnnnnnnnnnnnnnnnnnnnnnnnnnnnnnnnnnnnnnnnnnnnnnnnnnnnnnnnnnnnnnnnnnnnnnnnnnnnnnnnnnnnnnnnnnnnnnnnnnnnnnnnnnnnnnnnnnnnnnnnnnnnnnnnnnnnnnnnnnnnnnnnnnnnnnnnnnnnnnnnnnnnnnnnnnnnnnnnnnnnnnnnnnnnnnnnnnnnnnnnnnnnnnnnnnnnnnnnnnnnnnnnnnnnnnnnnnnnnnnnnnnnnnnnnnnnnnnnnnnnnnnnnnnnnnnnnnnnnnnnnnnnnnnnnnnnnnnnnnnnnnnnnnnnnnnnnnnnnnnnnnnnnnnnnnnnnnnnnnnnnnnnnnnnnnnnnnnnnnnnnnnnnnnnnnnnnnnnnnnnnnnnnnnnnnnnnnnnnnnnnnnnnnnnnnnnnnnnnnnnnnnnnnnnnnnnnnnnnnnnnnnnnnnnnnnnnnnnnnnnnnnnnnnnnnnnnnnnnnnnnnnnnnnnnnnnnnnnnnnnnnnnnnnnnnnnnnnnnnnnnnnnnnnnnnnnnnnnnnnnnnnnnnnnnnnnnnnnnnnnnnnnnnnnnnnnnnnnnnnnnnnnnnnnnnnnnnnnnnnnnnnnnnnnnnnnnnnnnnnnnnnnnnnnnnnnnnnnnnnnnnnnnnnnnnnnnnnnnnnnnnnnnnnnnnnnnnnnnnnnnnnnnnnnnnnnnnnnnnnnnnnnnnnnnnnnnnnnnnnnnnnnnnnnnnnnnnnnnnnnnnnnnnnnnnnnnnnnnnnnnnnnnnnnnnnnnnnnnnnnnnnnnnnnnnnnnnnnnnnnnnnnnnnnnnnnnnnnnnnnnnnnnnnnnnnnnnnnnnnnnnnnnnnnnnnnnnnnnnnnnnnnnnnnnnnnnnnnnnnnnnnnnnnnnnnnnnnnnnnnnnnnnnnnnnnnnnnnnnnnnnnnnnnnnnnnnnnnnnnnnnnnnnnnnnnnnnnnnnnnnnnnnnnnnnnnnnnnnnnnnnnnnnnnnnnnnnnnnnnnnnnnnnnnnnnnnnnnnnnnnnnnnnnnnnnnnnnnnnnnnnnnnnnnnnnnnnnnnnnnnnnnnnnnnnnnnnnnnnnnnnnnnnnnnnnnnnnnnnnnnnnnnnnnnnnnnnnnnnnnnnnnnnnnnnnnnnnnnnnnnnnnnnnnnnnnnnnnnnnnnnnnnnnnnnnnnnnnnnnnnnnnnnnnnnnnnnnnnnnnnnnnnnnnnnnnnnnnnnnnnnnnnnnnnnnnnnnnnnnnnnnnnnnnnnnnnnnnnnnnnnnnnnnnnnnnnnnnnnnnnnnnnnnnnnnnnnnnnnnnnnnnnnnnnnnnnnnnnnnnnnnnnnnnnnnnnnnnnnnnnnnnnnnnnnnnnnnnnnnnnnnnnnnnnnnnnnnnnnnnnnnnnnnnnnnnnnnnnnnnnnnnnnnnnnnnnnnnnnnnnnnnnnnnnnnnnnnnnnnnnnnnnnnnnnnnnnnnnnnnnnnnnnnnnnnnnnnnnnnnnnnnnnnnnnnnnnnnnnnnnnnnnnnnnnnnnnnnnnnnnnnnnnnnnnnnnnnnnnnnnnnnnnnnnnnnnnnnnnnnnnnnnnnnnnnnnnnnnnnnnnnnnnnnnnnnnnnnnnnnnnnnnnnnnnnnnnnnnnnnnnnnnnnnnnnnnnnnnnnnnnnnnnnnnnnnnnnnnnnnnnnnnnnnnnnnnnnnnnnnnnnnnnnnnnnnnnnnnnnnnnnnnnnnnnnnnnnnnnnnnnnnnnnnnnnnnnnnnnnnnnnnnnnnnnnnnnnnnnnnnnnnnnnnnnnnnnnnnnnnnnnnnnnnnnnnnnnnnnnnnnnnnnnnnnnnnnnnnnnnnnnnnnnnnnnnnnnnnnnnnnnnnnnnnnnnnnnnnnnnnnnnnnnnnnnnnnnnnnnnnnnnnnnnnnnnnnnnnnnnnnnnnnnnnnnnnnnnnnnnnnnnnnnnnnnnnnnnnnnnnnnnnnnnnnnnnnnnnnnnnnnnnnnnnnnnnnnnnnnnnnnnnnnnnnnnnnnnnnnnnnnnnnnnnnnnnnnnnnnnnnnnnnnnnnnnnnnnnnnnnnnnnnnnnnnnnnnnnnnnnnnnnnnnnnnnnnnnnnnnnnnnnnnnnnnnnnnnnnnnnnnnnnnnnnnnnnnnnnnnnnnnnnnnnnnnnnnnnnnnnnnnnnnnnnnnnnnnnnnnnnnnnnnnnnnnnnnnnnnnnnnnnnnnnnnnnnnnnnnnnnnnnnnnnnnnnnnnnnnnnnnnnnnnnnnnnnnnnnnnnnnnnnnnnnnnnnnnnnnnnnnnnnnnnnnnnnnnnnnnnnnnnnnnnnnnnnnnnnnnnnnnnnnnnnnnnnnnnnnnnnnnnnnnnnnnnnnnnnnnnnnnnnnnnnnnnnnnnnnnnnnnnnnnnnnnnnnnnnnnnnnnnnnnnnnnnnnnnnnnnnnnnnnnnnnnnnnnnnnnnnnnnnnnnnnnnnnnnnnnnnnnnnnnnnnnnnnnnnnnnnnnnnnnnnnnnnnnnnnnnnnnnnnnnnnnnnnnnnnnnnnnnnnnnnnnnnnnnnnnnnnnnnnnnnnnnnnnnnnnnnnnnnnnnnnnnnnnnnnnnnnnnnnnnnnnnnnnnnnnnnnnnnnnnnnnnnnnnnnnnnnnnnnnnnnnnnnnnnnnnnnnnnnnnnnnnnnnnnnnnnnnnnnnnnnnnnnnnnnnnnnnnnnnnnnnnnnnnnnnnnnnnnnnnnnnnnnnnnnnnnnnnnnnnnnnnnnnnnnnnnnnnnnnnnnnnnnnnnnnnnnnnnnnnnnnnnnnnnnnnnnnnnnnnnnnnnnnnnnnnnnnnnnnnnnnnnnnnnnnnnnnnnnnnnnnnnnnnnnnnnnnnnnnnnnnnnnnnnnnnnnnnnnnnnnnnnnnnnnnnnnnnnnnnnnnnnnnnnnnnnnnnnnnnnnnnnnnnnnnnnnnnnnnnnnnnnnnnnnnnnnnnnnnnnnnnnnnnnnnnnnnnnnnnnnnnnnnnnnnnnnnnnnnnnnnnnnnnnnnnnnnnnnnnnnnnnnnnnnnnnnnnnnnnnnnnnnnnnnnnnnnnnnnnnnnnnnnnnnnnnnnnnnnnnnnnnnnnnnnnnnnnnnnnnnnnnnnnnnnnnnnnnnnnnnnnnnnnnnnnnnnnnnnnnnnnnnnnnnnnnnnnnnnnnnnnnnnnnnnnnnnnnnnnnnnnnnnnnnnnnnnnnnnnnnnnnnnnnnnnnnnnnnnnnnnnnnnnnnnnnnnnnnnnnnnnnnnnnnnnnnnnnnnnnnnnnnnnnnnnnnnnnnnnnnnnnnnnnnnnnnnnnnnnnnnnnnnnnnnnnnnnnnnnnnnnnnnnnnnnnnnnnnnnnnnnnnnnnnnnnnnnnnnnnnnnnnnnnnnnnnnnnnnnnnnnnnnnnnnnnnnnnnnnnnnnnnnnnnnnnnnnnnnnnnnnnnnnnnnnnnnnnnnnnnnnnnnnnnnnnnnnnnnnnnnnnnnnnnnnnnnnnnnnnnnnnnnnnnnnnnnnnnnnnnnnnnnnnnnnnnnnnnnnnnnnnnnnnnnnnnnnnnnnnnnnnnnnnnnnnnnnnnnnnnnnnnnnnnnnnnnnnnnnnnnnnnnnnnnnnnnnnnnnnnnnnnnnnnnnnnnnnnnnnnnnnnnnnnnnnnnnnnnnnnnnnnnnnnnnnnnnnnnnnnnnnnnnnnnnnnnnnnnnnnnnnnnnnnnnnnnnnnnnnnnnnnnnnnnnnnnnnnnnnnnnnnnnnnnnnnnnnnnnnnnnnnnnnnnnnnnnnnnnnnnnnnnnnnnnnnnnnnnnnnnnnnnnnnnnnnnnnnnnnnnnnnnnnnnnnnnnnnnnnnnnnnnnnnnnnnnnnnnnnnnnnnnnnnnnnnnnnnnnnnnnnnnnnnnnnnnnnnnnnnnnnnnnnnnnnnnnnnnnnnnnnnnnnnnnnnnnnnnnnnnnnnnnnnnnnnnnnnnnnnnnnnnnnnnnnnnnnnnnnnnnnnnnnnnnnnnnnnnnnnnnnnnnnnnnnnnnnnnnnnnnnnnnnnnnnnnnnnnnnnnnnnnnnnnnnnnnnnnnnnnnnnnnnnnnnnnnnnnnnnnnnnnnnnnnnnnnnnnnnnnnnnnnnnnnnnnnnnnnnnnnnnnnnnnnnnnnnnnnnnnnnnnnnnnnnnnnnnnnnnnnnnnnnnnnnnnnnnnnnnnnnnnnnnnnnnnnnnnnnnnnnnnnnnnnnnnnnnnnnnnnnnnnnnnnnnnnnnnnnnnnnnnnnnnnnnnnnnnnnnnnnnnnnnnnnnnnnnnnnnnnnnnnnnnnnnnnnnnnnnnnnnnnnnnnnnnnnnnnnnnnnnnnnnnnnnnnnnnnnnnnnnnnnnnnnnnnnnnnnnnnnnnnnnnnnnnnnnnnnnnnnnnnnnnnnnnnnnnnnnnnnnnnnnnnnnnnnnnnnnnnnnnnnnnnnnnnnnnnnnnnnnnnnnnnnnnnnnnnnnnnnnnnnnnnnnnnnnnnnnnnnnnnnnnnnnnnnnnnnnnnnnnnnnnnnnnnnnnnnnnnnnnnnnnnnnnnnnnnnnnnnnnnnnnnnnnnnnnnnnnnnnnnnnnnnnnnnnnnnnnnnnnnnnnnnnnnnnnnnnnnnnnnnnnnnnnnnnnnnnnnnnnnnnnnnnnnnnnnnnnnnnnnnnnnnnnnnnnnnnnnnnnnnnnnnnnnnnnnnnnnnnnnnnnnnnnnnnnnnnnnnnnnnnnnnnnnnnnnnnnnnnnnnnnnnnnnnnnnnnnnnnnnnnnnnnnnnnnnnnnnnnnnnnnnnnnnnnnnnnnnnnnnnnnnnnnnnnnnnnnnnnnnnnnnnnnnnnnnnnnnnnnnnnnnnnnnnnnnnnnnnnnnnnnnnnnnnnnnnnnnnnnnnnnnnnnnnnnnnnnnnnnnnnnnnnnnnnnnnnnnnnnnnnnnnnnnnnnnnnnnnnnnnnnnnnnnnnnnnnnnnnnnnnnnnnnnnnnnnnnnnnnnnnnnnnnnnnnnnnnnnnnnnnnnnnnnnnnnnnnnnnnnnnnnnnnnnnnnnnnnnnnnnnnnnnnnnnnnnnnnnnnnnnnnnnnnnnnnnnnnnnnnnnnnnnnnnnnnnnnnnnnnnnnnnnnnnnnnnnnnnnnnnnnnnnnnnnnnnnnnnnnnnnnnnnnnnnnnnnnnnnnnnnnnnnnnnnnnnnnnnnnnnnnnnnnnnnnnnnnnnnnnnnnnnnnnnnnnnnnnnnnnnnnnnnnnnnnnnnnnnnnnnnnnnnnnnnnnnnnnnnnnnnnnnnnnnnnnnnnnnnnnnnnnnnnnnnnnnnnnnnnnnnnnnnnnnnnnnnnnnnnnnnnnnnnnnnnnnnnnnnnnnnnnnnnnnnnnnnnnnnnnnnnnnnnnnnnnnnnnnnnnnnnnnnnnnnnnnnnnnnnnnnnnnnnnnnnnnnnnnnnnnnnnnnnnnnnnnnnnnnnnnnnnnnnnnnnnnnnnnnnnnnnnnnnnnnnnnnnnnnnnnnnnnnnnnnnnnnnnnnnnnnnnnnnnnnnnnnnnnnnnnnnnnnnnnnnnnnnnnnnnnnnnnnnnnnnnnnnnnnnnnnnnnnnnnnnnnnnnnnnnnnnnnnnnnnnnnnnnnnnnnnnnnnnnnnnnnnnnnnnnnnnnnnnnnnnnnnnnnnnnnnnnnnnnnnnnnnnnnnnnnnnnnnnnnnnnnnnnnnnnnnnnnnnnnnnnnnnnnnnnnnnnnnnnnnnnnnnnnnnnnnnnnnnnnnnnnnnnnnnnnnnnnnnnnnnnnnnnnnnnnnnnnnnnnnnnnnnnnnnnnnnnnnnnnnnnnnnnnnnnnnnnnnnnnnnnnnnnnnnnnnnnnnnnnnnnnnnnnnnnnnnnnnnnnnnnnnnnnnnnnnnnnnnnnnnnnnnnnnnnnnnnnnnnnnnnnnnnnnnnnnnnnnnnnnnnnnnnnnnnnnnnnnnnnnnnnnnnnnnnnnnnnnnnnnnnnnnnnnnnnnnnnnnnnnnnnnnnnnnnnnnnnnnnnnnnnnnnnnnnnnnnnnnnnnnnnnnnnnnnnnnnnnnnnnnnnnnnnnnnnnnnnnnnnnnnnnnnnnnnnnnnnnnnnnnnnnnnnnnnnnnnnnnnnnnnnnnnnnnnnnnnnnnnnnnnnnnnnnnnnnnnnnnnnnnnnnnnnnnnnnnnnnnnnnnnnnnnnnnnnnnnnnnnnnnnnnnnnnnnnnnnnnnnnnnnnnnnnnnnnnnnnnnnnnnnnnnnnnnnnnnnnnnnnnnnnnnnnnnnnnnnnnnnnnnnnnnnnnnnnnnnnnnnnnnnnnnnnnnnnnnnnnnnnnnnnnnnnnnnnnnnnnnnnnnnnnnnnnnnnnnnnnnnnnnnnnnnnnnnnnnnnnnnnnnnnnnnnnnnnnnnnnnnnnnnnnnnnnnnnnnnnnnnnnnnnnnnnnnnnnnnnnnnnnnnnnnnnnnnnnnnnnnnnnnnnnnnnnnnnnnnnnnnnnnnnnnnnnnnnnnnnnnnnnnnnnnnnnnnnnnnnnnnnnnnnnnnnnnnnnnnnnnnnnnnnnnnnnnnnnnnnnnnnnnnnnnnnnnnnnnnnnnnnnnnnnnnnnnnnnnnnnnnnnnnnnnnnnnnnnnnnnnnnnnnnnnnnnnnnnnnnnnnnnnnnnnnnnnnnnnnnnnnnnnnnnnnnnnnnnnnnnnnnnnnnnnnnnnnnnnnnnnnnnnnnnnnnnnnnnnnnnnnnnnnnnnnnnnnnnnnnnnnnnnnnnnnnnnnnnnnnnnnnnnnnnnnnnnnnnnnnnnnnnnnnnnnnnnnnnnnnnnnnnnnnnnnnnnnnnnnnnnnnnnnnnnnnnnnnnnnnnnnnnnnnnnnnnnnnnnnnnnnnnnnnnnnnnnnnnnnnnnnnnnnnnnnnnnnnnnnnnnnnnnnnnnnnnnnnnnnnnnnnnnnnnnnnnnnnnnnnnnnnnnnnnnnnnnnnnnnnnnnnnnnnnnnnnnnnnnnnnnnnnnnnnnnnnnnnnnnnnnnnnnnnnnnnnnnnnnnnnnnnnnnnnnnnnnnnnnnnnnnnnnnnnnnnnnnnnnnnnnnnnnnnnnnnnnnnnnnnnnnnnnnnnnnnnnnnnnnnnnnnnnnnnnnnnnnnnnnnnnnnnnnnnnnnnnnnnnnnnnnnnnnnnnnnnnnnnnnnnnnnnnnnnnnnnnnnnnnnnnnnnnnnnnnnnnnnnnnnnnnnnnnnnnnnnnnnnnnnnnnnnnnnnnnnnnnnnnnnnnnnnnnnnnnnnnnnnnnnnnnnnnnnnnnnnnnnnnnnnnnnnnnnnnnnnnnnnnnnnnnnnnnnnnnnnnnnnnnnnnnnnnnnnnnnnnnnnnnnnnnnnnnnnnnnnnnnnnnnnnnnnnnnnnnnnnnnnnnnnnnnnnnnnnnnnnnnnnnnnnnnnnnnnnnnnnnnnnnnnnnnnnnnnnnnnnnnnnnnnnnnnnnnnnnnnnnnnnnnnnnnnnnnnnnnnnnnnnnnnnnnnnnnnnnnnnnnnnnnnnnnnnnnnnnnnnnnnnnnnnnnnnnnnnnnnnnnnnnnnnnnnnnnnnnnnnnnnnnnnnnnnnnnnnnnnnnnnnnnnnnnnnnnnnnnnnnnnnnnnnnnnnnnnnnnnnnnnnnnnnnnnnnnnnnnnnnnnnnnnnnnnnnnnnnnnnnnnnnnnnnnnnnnnnnnnnnnnnnnnnnnnnnnnnnnnnnnnnnnnnnnnnnnnnnnnnnnnnnnnnnnnnnnnnnnnnnnnnnnnnnnnnnnnnnnnnnnnnnnnnnnnnnnnnnnnnnnnnnnnnnnnnnnnnnnnnnnnnnnnnnnnnnnnnnnnnnnnnnnnnnnnnnnnnnnnnnnnnnnnnnnnnnnnnnnnnnnnnnnnnnnnnnnnnnnnnnnnnnnnnnnnnnnnnnnnnnnnnnnnnnnnnnnnnnnnnnnnnnnnnnnnnnnnnnnnnnnnnnnnnnnnnnnnnnnnnnnnnnnnnnnnnnnnnnnnnnnnnnnnnnnnnnnnnnnnnnnnnnnnnnnnnnnnnnnnnnnnnnnnnnnnnnnnnnnnnnnnnnnnnnnnnnnnnnnnnnnnnnnnnnnnnnnnnnnnnnnnnnnnnnnnnnnnnnnnnnnnnnnnnnnnnnnnnnnnnnnnnnnnnnnnnnnnnnnnnnnnnnnnnnnnnnnnnnnnnnnnnnnnnnnnnnnnnnnnnnnnnnnnnnnnnnnnnnnnnnnnnnnnnnnnnnnnnnnnnnnnnnnnnnnnnnnnnnnnnnnnnnnnnnnnnnnnnnnnnnnnnnnnnnnnnnnnnnnnnnnnnnnnnnnnnnnnnnnnnnnnnnnnnnnnnnnnnnnnnnnnnnnnnnnnnnnnnnnnnnnnnnnnnnnnnnnnnnnnnnnnnnnnnnnnnnnnnnnnnnnnnnnnnnnnnnnnnnnnnnnnnnnnnnnnnnnnnnnnnnnnnnnnnnnnnnnnnnnnnnnnnnnnnnnnnnnnnnnnnnnnnnnnnnnnnnnnnnnnnnnnnnnnnnnnnnnnnnnnnnnnnnnnnnnnnnnnnnnnnnnnnnnnnnnnnnnnnnnnnnnnnnnnnnnnnnnnnnnnnnnnnnnnnnnnnnnnnnnnnnnnnnnnnnnnnnnnnnnnnnnnnnnnnnnnnnnnnnnnnnnnnnnnnnnnnnnnnnnnnnnnnnnnnnnnnnnnnnnnnnnnnnnnnnnnnnnnnnnnnnnnnnnnnnnnnnnnnnnnnnnnnnnnnnnnnnnnnnnnnnnnnnnnnnnnnnnnnnnnnnnnnnnnnnnnnnnnnnnnnnnnnnnnnnnnnnnnnnnnnnnnnnnnnnnnnnnnnnnnnnnnnnnnnnnnnnnnnnnnnnnnnnnnnnnnnnnnnnnnnnnnnnnnnnnnnnnnnnnnnnnnnnnnnnnnnnnnnnnnnnnnnnnnnnnnnnnnnnnnnnnnnnnnnnnnnnnnnnnnnnnnnnnnnnnnnnnnnnnnnnnnnnnnnnnnnnnnnnnnnnnnnnnnnnnnnnnnnnnnnnnnnnnnnnnnnnnnnnnnnnnnnnnnnnnnnnnnnnnnnnnnnnnnnnnnnnnnnnnnnnnnnnnnnnnnnnnnnnnnnnnnnnnnnnnnnnnnnnnnnnnnnnnnnnnnnnnnnnnnnnnnnnnnnnnnnnnnnnnnnnnnnnnnnnnnnnnnnnnnnnnnnnnnnnnnnnnnnnnnnnnnnnnnnnnnnnnnnnnnnnnnnnnnnnnnnnnnnnnnnnnnnnnnnnnnnnnnnnnnnnnnnnnnnnnnnnnnnnnnnnnnnnnnnnnnnnnnnnnnnnnnnnnnnnnnnnnnnnnnnnnnnnnnnnnnnnnnnnnnnnnnnnnnnnnnnnnnnnnnnnnnnnnnnnnnnnnnnnnnnnnnnnnnnnnnnnnnnnnnnnnnnnnnnnnnnnnnnnnnnnnnnnnnnnnnnnnnnnnnnnnnnnnnnnnnnnnnnnnnnnnnnnnnnnnnnnnnnnnnnnnnnnnnnnnnnnnnnnnnnnnnnnnnnnnnnnnnnnnnnnnnnnnnnnnnnnnnnnnnnnnnnnnnnnnnnnnnnnnnnnnnnnnnnnnnnnnnnnnnnnnnnnnnnnnnnnnnnnnnnnnnnnnnnnnnnnnnnnnnnnnnnnnnnnnnnnnnnnnnnnnnnnnnnnnnnnnnnnnnnnnnnnnnnnnnnnnnnnnnnnnnnnnnnnnnnnnnnnnnnnnnnnnnnnnnnnnnnnnnnnnnnnnnnnnnnnnnnnnnnnnnnnnnnnnnnnnnnnnnnnnnnnnnnnnnnnnnnnnnnnnnnnnnnnnnnnnnnnnnnnnnnnnnnnnnnnnnnnnnnnnnnnnnnnnnnnnnnnnnnnnnnnnnnnnnnnnnnnnnnnnnnnnnnnnnnnnnnnnnnnnnnnnnnnnnnnnnnnnnnnnnnnnnnnnnnnnnnnnnnnnnnnnnnnnnnnnnnnnnnnnnnnnnnnnnnnnnnnnnnnnnnnnnnnnnnnnnnnnnnnnnnnnnnnnnnnnnnnnnnnnnnnnnnnnnnnnnnnnnnnnnnnnnnnnnnnnnnnnnnnnnnnnnnnnnnnnnnnnnnnnnnnnnnnnnnnnnnnnnnnnnnnnnnnnnnnnnnnnnnnnnnnnnnnnnnnnnnnnnnnnnnnnnnnnnnnnnnnnnnnnnnnnnnnnnnnnnnnnnnnnnnnnnnnnnnnnnnnnnnnnnnnnnnnnnnnnnnnnnnnnnnnnnnnnnnnnnnnnnnnnnnnnnnnnnnnnnnnnnnnnnnnnnnnnnnnnnnnnnnnnnnnnnnnnnnnnnnnnnnnnnnnnnnnnnnnnnnnnnnnnnnnnnnnnnnnnnnnnnnnnnnnnnnnnnnnnnnnnnnnnnnnnnnnnnnnnnnnnnnnnnnnnnnnnnnnnnnnnnnnnnnnnnnnnnnnnnnnnnnnnnnnnnnnnnnnnnnnnnnnnnnnnnnnnnnnnnnnnnnnnnnnnnnnnnnnnnnnnnnnnnnnnnnnnnnnnnnnnnnnnnnnnnnnnnnnnnnnnnnnnnnnnnnnnnnnnnnnnnnnnnnnnnnnnnnnnnnnnnnnnnnnnnnnnnnnnnnnnnnnnnnnnnnnnnnnnnnnnnnnnnnnnnnnnnnnnnnnnnnnnnnnnnnnnnnnnnnnnnnnnnnnnnnnnnnnnnnnnnnnnnnnnnnnnnnnnnnnnnnnnnnnnnnnnnnnnnnnnnnnnnnnnnnnnnnnnnnnnnnnnnnnnnnnnnnnnnnnnnnnnnnnnnnnnnnnnnnnnnnnnnnnnnnnnnnnnnnnnnnnnnnnnnnnnnnnnnnnnnnnnnnnnnnnnnnnnnnnnnnnnnnnnnnnnnnnnnnnnnnnnnnnnnnnnnnnnnnnnnnnnnnnnnnnnnnnnnnnnnnnnnnnnnnnnnnnnnnnnnnnnnnnnnnnnnnnnnnnnnnnnnnnnnnnnnnnnnnnnnnnnnnnnnnnnnnnnnnnnnnnnnnnnnnnnnnnnnnnnnnnnnnnnnnnnnnnnnnnnnnnnnnnnnnnnnnnnnnnnnnnnnnnnnnnnnnnnnnnnnnnnnnnnnnnnnnnnnnnnnnnnnnnnnnnnnnnnnnnnnnnnnnnnnnnnnnnnnnnnnnnnnnnnnnnnnnnnnnnnnnnnnnnnnnnnnnnnnnnnnnnnnnnnnnnnnnnnnnnnnnnnnnnnnnnnnnnnnnnnnnnnnnnnnnnnnnnnnnnnnnnnnnnnnnnnnnnnnnnnnnnnnnnnnnnnnnnnnnnnnnnnnnnnnnnnnnnnnnnnnnnnnnnnnnnnnnnnnnnnnnnnnnnnnnnnnnnnnnnnnnnnnnnnnnnnnnnnnnnnnnnnnnnnnnnnnnnnnnnnnnnnnnnnnnnnnnnnnnnnnnnnnnnnnnnnnnnnnnnnnnnnnnnnnnnnnnnnnnnnnnnnnnnnnnnnnnnnnnnnnnnnnnnnnnnnnnnnnnnnnnnnnnnnnnnnnnnnnnnnnnnnnnnnnnnnnnnnnnnnnnnnnnnnnnnnnnnnnnnnnnnnnnnnnnnnnnnnnnnnnnnnnnnnnnnnnnnnnnnnnnnnnnnnnnnnnnnnnnnnnnnnnnnnnnnnnnnnnnnnnnnnnnnnnnnnnnnnnnnnnnnnnnnnnnnnnnnnnnnnnnnnnnnnnnnnnnnnnnnnnnnnnnnnnnnnnnnnnnnnnnnnnnnnnnnnnnnnnnnnnnnnnnnnnnnnnnnnnnnnnnnnnnnnnnnnnnnnnnnnnnnnnnnnnnnnnnnnnnnnnnnnnnnnnnnnnnnnnnnnnnnnnnnnnnnnnnnnnnnnnnnnnnnnnnnnnnnnnnnnnnnnnnnnnnnnnnnnnnnnnnnnnnnnnnnnnnnnnnnnnnnnnnnnnnnnnnnnnnnnnnnnnnnnnnnnnnnnnnnnnnnnnnnnnnnnnnnnnnnnnnnnnnnnnnnnnnnnnnnnnnnnnnnnnnnnnnnnnnnnnnnnnnnnnnnnnnnnnnnnnnnnnnnnnnnnnnnnnnnnnnnnnnnnnnnnnnnnnnnnnnnnnnnnnnnnnnnnnnnnnnnnnnnnnnnnnnnnnnnnnnnnnnnnnnnnnnnnnnnnnnnnnnnnnnnnnnnnnnnnnnnnnnnnnnnnnnnnnnnnnnnnnnnnnnnnnnnnnnnnnnnnnnnnnnnnnnnnnnnnnnnnnnnnnnnnnnnnnnnnnnnnnnnnnnnnnnnnnnnnnnnnnnnnnnnnnnnnnnnnnnnnnnnnnnnnnnnnnnnnnnnnnnnnnnnnnnnnnnnnnnnnnnnnnnnnnnnnnnnnnnnnnnnnnnnnnnnnnnnnnnnnnnnnnnnnnnnnnnnnnnnnnnnnnnnnnnnnnnnnnnnnnnnnnnnnnnnnnnnnnnnnnnnnnnnnnnnnnnnnnnnnnnnnnnnnnnnnnnnnnnnnnnnnnnnnnnnnnnnnnnnnnnnnnnnnnnnnnnnnnnnnnnnnnnnnnnnnnnnnnnnnnnnnnnnnnnnnnnnnnnnnnnnnnnnnnnnnnnnnnnnnnnnnnnnnnnnnnnnnnnnnnnnnnnnnnnnnnnnnnnnnnnnnnnnnnnnnnnnnnnnnnnnnnnnnnnnnnnnnnnnnnnnnnnnnnnnnnnnnnnnnnnnnnnnnnnnnnnnnnnnnnnnnnnnnnnnnnnnnnnnnnnnnnnnnnnnnnnnnnnnnnnnnnnnnnnnnnnnnnnnnnnnnnnnnnnnnnnnnnnnnnnnnnnnnnnnnnnnnnnnnnnnnnnnnnnnnnnnnnnnnnnnnnnnnnnnnnnnnnnnnnnnnnnnnnnnnnnnnnnnnnnnnnnnnnnnnnnnnnnnnnnnnnnnnnnnnnnnnnnnnnnnnnnnnnnnnnnnnnnnnnnnnnnnnnnnnnnnnnnnnnnnnnnnnnnnnnnnnnnnnnnnnnnnnnnnnnnnnnnnnnnnnnnnnnnnnnnnnnnnnnnnnnnnnnnnnnnnnnnnnnnnnnnnnnnnnnnnnnnnnnnnnnnnnnnnnnnnnnnnnnnnnnnnnnnnnnnnnnnnnnnnnnnnnnnnnnnnnnnnnnnnnnnnnnnnnnnnnnnnnnnnnnnnnnnnnnnnnnnnnnnnnnnnnnnnnnnnnnnnnnnnnnnnnnnnnnnnnnnnnnnnnnnnnnnnnnnnnnnnnnnnnnnnnnnnnnnnnnnnnnnnnnnnnnnnnnnnnnnnnnnnnnnnnnnnnnnnnnnnnnnnnnnnnnnnnnnnnnnnnnnnnnnnnnnnnnnnnnnnnnnnnnnnnnnnnnnnnnnnnnnnnnnnnnnnnnnnnnnnnnnnnnnnnnnnnnnnnnnnnnnnnnnnnnnnnnnnnnnnnnnnnnnnnnnnnnnnnnnnnnnnnnnnnnnnnnnnnnnnnnnnnnnnnnnnnnnnnnnnnnnnnnnnnnnnnnnnnnnnnnnnnnnnnnnnnnnnnnnnnnnnnnnnnnnnnnnnnnnnnnnnnnnnnnnnnnnnnnnnnnnnnnnnnnnnnnnnnnnnnnnnnnnnnnnnnnnnnnnnnnnnnnnnnnnnnnnnnnnnnnnnnnnnnnnnnnnnnnnnnnnnnnnnnnnnnnnnnnnnnnnnnnnnnnnnnnnnnnnnnnnnnnnnnnnnnnnnnnnnnnnnnnnnnnnnnnnnnnnnnnnnnnnnnnnnnnnnnnnnnnnnnnnnnnnnnnnnnnnnnnnnnnnnnnnnnnnnnnnnnnnnnnnnnnnnnnnnnnnnnnnnnnnnnnnnnnnnnnnnnnnnnnnnnnnnnnnnnnnnnnnnnnnnnnnnnnnnnnnnnnnnnnnnnnnnnnnnnnnnnnnnnnnnnnnnnnnnnnnnnnnnnnnnnnnnnnnnnnnnnnnnnnnnnnnnnnnnnnnnnnnnnnnnnnnnnnnnnnnnnnnnnnnnnnnnnnnnnnnnnnnnnnnnnnnnnnnnnnnnnnnnnnnnnnnnnnnnnnnnnnnnnnnnnnnnnnnnnnnnnnnnnnnnnnnnnnnnnnnnnnnnnnnnnnnnnnnnnnnnnnnnnnnnnnnnnnnnnnnnnnnnnnnnnnnnnnnnnnnnnnnnnnnnnnnnnnnnnnnnnnnnnnnnnnnnnnnnnnnnnnnnnnnnnnnnnnnnnnnnnnnnnnnnnnnnnnnnnnnnnnnnnnnnnnnnnnnnnnnnnnnnnnnnnnnnnnnnnnnnnnnnnnnnnnnnnnnnnnnnnnnnnnnnnnnnnnnnnnnnnnnnnnnnnnnnnnnnnnnnnnnnnnnnnnnnnnnnnnnnnnnnnnnnnnnnnnnnnnnnnnnnnnnnnnnnnnnnnnnnnnnnnnnnnnnnnnnnnnnnnnnnnnnnnnnnnnnnnnnnnnnnnnnnnnnnnnnnnnnnnnnnnnnnnnnnnnnnnnnnnnnnnnnnnnnnnnnnnnnnnnnnnnnnnnnnnnnnnnnnnnnnnnnnnnnnnnnnnnnnnnnnnnnnnnnnnnnnnnnnnnnnnnnnnnnnnnnnnnnnnnnnnnnnnnnnnnnnnnnnnnnnnnnnnnnnnnnnnnnnnnnnnnnnnnnnnnnnnnnnnnnnnnnnnnnnnnnnnnnnnnnnnnnnnnnnnnnnnnnnnnnnnnnnnnnnnnnnnnnnnnnnnnnnnnnnnnnnnnnnnnnnnnnnnnnnnnnnnnnnnnnnnnnnnnnnnnnnnnnnnnnnnnnnnnnnnnnnnnnnnnnnnnnnnnnnnnnnnnnnnnnnnnnnnnnnnnnnnnnnnnnnnnnnnnnnnnnnnnnnnnnnnnnnnnnnnnnnnnnnnnnnnnnnnnnnnnnnnnnnnnnnnnnnnnnnnnnnnnnnnnnnnnnnnnnnnnnnnnnnnnnnnnnnnnnnnnnnnnnnnnnnnnnnnnnnnnnnnnnnnnnnnnnnnnnnnnnnnnnnnnnnnnnnnnnnnnnnnnnnnnnnnnnnnnnnnnnnnnnnnnnnnnnnnnnnnnnnnnnnnnnnnnnnnnnnnnnnnnnnnnnnnnnnnnnnnnnnnnnnnnnnnnnnnnnnnnnnnnnnnnnnnnnnnnnnnnnnnnnnnnnnnnnnnnnnnnnnnnnnnnnnnnnnnnnnnnnnnnnnnnnnnnnnnnnnnnnnnnnnnnnnnnnnnnnnnnnnnnnnnnnnnnnnnnnnnnnnnnnnnnnnnnnnnnnnnnnnnnnnnnnnnnnnnnnnnnnnnnnnnnnnnnnnnnnnnnnnnnnnnnnnnnnnnnnnnnnnnnnnnnnnnnnnnnnnnnnnnnnnnnnnnnnnnnnnnnnnnnnnnnnnnnnnnnnnnnnnnnnnnnnnnnnnnnnnnnnnnnnnnnnnnnnnnnnnnnnnnnnnnnnnnnnnnnnnnnnnnnnnnnnnnnnnnnnnnnnnnnnnnnnnnnnnnnnnnnnnnnnnnnnnnnnnnnnnnnnnnnnnnnnnnnnnnnnnnnnnnnnnnnnnnnnnnnnnnnnnnnnnnnnnnnnnnnnnnnnnnnnnnnnnnnnnnnnnnnnnnnnnnnnnnnnnnnnnnnnnnnnnnnnnnnnnnnnnnnnnnnnnnnnnnnnnnnnnnnnnnnnnnnnnnnnnnnnnnnnnnnnnnnnnnnnnnnnnnnnnnnnnnnnnnnnnnnnnnnnnnnnnnnnnnnnnnnnnnnnnnnnnnnnnnnnnnnnnnnnnnnnnnnnnnnnnnnnnnnnnnnnnnnnnnnnnnnnnnnnnnnnnnnnnnnnnnnnnnnnnnnnnnnnnnnnnnnnnnnnnnnnnnnnnnnnnnnnnnnnnnnnnnnnnnnnnnnnnnnnnnnnnnnnnnnnnnnnnnnnnnnnnnnnnnnnnnnnnnnnnnnnnnnnnnnnnnnnnnnnnnnnnnnnnnnnnnnnnnnnnnnnnnnnnnnnnnnnnnnnnnnnnnnnnnnnnnnnnnnnnnnnnnnnnnnnnnnnnnnnnnnnnnnnnnnnnnnnnnnnnnnnnnnnnnnnnnnnnnnnnnnnnnnnnnnnnnnnnnnnnnnnnnnnnnnnnnnnnnnnnnnnnnnnnnnnnnnnnnnnnnnnnnnnnnnnnnnnnnnnnnnnnnnnnnnnnnnnnnnnnnnnnnnnnnnnnnnnnnnnnnnnnnnnnnnnnnnnnnnnnnnnnnnnnnnnnnnnnnnnnnnnnnnnnnnnnnnnnnnnnnnnnnnnnnnnnnnnnnnnnnnnnnnnnnnnnnnnnnnnnnnnnnnnnnnnnnnnnnnnnnnnnnnnnnnnnnnnnnnnnnnnnnnnnnnnnnnnnnnnnnnnnnnnnnnnnnnnnnnnnnnnnnnnnnnnnnnnnnnnnnnnnnnnnnnnnnnnnnnnnnnnnnnnnnnnnnnnnnnnnnnnnnnnnnnnnnnnnnnnnnnnnnnnnnnnnnnnnnnnnnnnnnnnnnnnnnnnnnnnnnnnnnnnnnnnnnnnnnnnnnnnnnnnnnnnnnnnnnnnnnnnnnnnnnnnnnnnnnnnnnnnnnnnnnnnnnnnnnnnnnnnnnnnnnnnnnnnnnnnnnnnnnnnnnnnnnnnnnnnnnnnnnnnnnnnnnnnnnnnnnnnnnnnnnnnnnnnnnnnnnnnnnnnnnnnnnnnnnnnnnnnnnnnnnnnnnnnnnnnnnnnnnnnnnnnnnnnnnnnnnnnnnnnnnnnnnnnnnnnnnnnnnnnnnnnnnnnnnnnnnnnnnnnnnnnnnnnnnnnnnnnnnnnnnnnnnnnnnnnnnnnnnnnnnnnnnnnnnnnnnnnnnnnnnnnnnnnnnnnnnnnnnnnnnnnnnnnnnnnnnnnnnnnnnnnnnnnnnnnnnnnnnnnnnnnnnnnnnnnnnnnnnnnnnnnnnnnnnnnnnnnnnnnnnnnnnnnnnnnnnnnnnnnnnnnnnnnnnnnnnnnnnnnnnnnnnnnnnnnnnnnnnnnnnnnnnnnnnnnnnnnnnnnnnnnnnnnnnnnnnnnnnnnnnnnnnnnnnnnnnnnnnnnnnnnnnnnnnnnnnnnnnnnnnnnnnnnnnnnnnnnnnnnnnnnnnnnnnnnnnnnnnnnnnnnnnnnnnnnnnnnnnnnnnnnnnnnnnnnnnnnnnnnnnnnnnnnnnnnnnnnnnnnnnnnnnnnnnnnnnnnnnnnnnnnnnnnnnnnnnnnnnnnnnnnnnnnnnnnnnnnnnnnnnnnnnnnnnnnnnnnnnnnnnnnnnnnnnnnnnnnnnnnnnnnnnnnnnnnnnnnnnnnnnnnnnnnnnnnnnnnnnnnnnnnnnnnnnnnnnnnnnnnnnnnnnnnnnnnnnnnnnnnnnnnnnnnnnnnnnnnnnnnnnnnnnnnnnnnnnnnnnnnnnnnnnnnnnnnnnnnnnnnnnnnnnnnnnnnnnnnnnnnnnnnnnnnnnnnnnnnnnnnnnnnnnnnnnnnnnnnnnnnnnnnnnnnnnnnnnnnnnnnnnnnnnnnnnnnnnnnnnnnnnnnnnnnnnnnnnnnnnnnnnnnnnnnnnnnnnnnnnnnnnnnnnnnnnnnnnnnnnnnnnnnnnnnnnnnnnnnnnnnnnnnnnnnnnnnnnnnnnnnnnnnnnnnnnnnnnnnnnnnnnnnnnnnnnnnnnnnnnnnnnnnnnnnnnnnnnnnnnnnnnnnnnnnnnnnnnnnnnnnnnnnnnnnnnnnnnnnnnnnnnnnnnnnnnnnnnnnnnnnnnnnnnnnnnnnnnnnnnnnnnnnnnnnnnnnnnnnnnnnnnnnnnnnnnnnnnnnnnnnnnnnnnnnnnnnnnnnnnnnnnnnnnnnnnnnnnnnnnnnnnnnnnnnnnnnnnnnnnnnnnnnnnnnnnnnnnnnnnnnnnnnnnnnnnnnnnnnnnnnnnnnnnnnnnnnnnnnnnnnnnnnnnnnnnnnnnnnnnnnnnnnnnnnnnnnnnnnnnnnnnnnnnnnnnnnnnnnnnnnnnnnnnnnnnnnnnnnnnnnnnnnnnnnnnnnnnnnnnnnnnnnnnnnnnnnnnnnnnnnnnnnnnnnnnnnnnnnnnnnnnnnnnnnnnnnnnnnnnnnnnnnnnnnnnnnnnnnnnnnnnnnnnnnnnnnnnnnnnnnnnnnnnnnnnnnnnnnnnnnnnnnnnnnnnnnnnnnnnnnnnnnnnnnnnnnnnnnnnnnnnnnnnnnnnnnnnnnnnnnnnnnnnnnnnnnnnnnnnnnnnnnnnnnnnnnnnnnnnnnnnnnnnnnnnnnnnnnnnnnnnnnnnnnnnnnnnnnnnnnnnnnnnnnnnnnnnnnnnnnnnnnnnnnnnnnnnnnnnnnnnnnnnnnnnnnnnnnnnnnnnnnnnnnnnnnnnnnnnnnnnnnnnnnnnnnnnnnnnnnnnnnnnnnnnnnnnnnnnnnnnnnnnnnnnnnnnnnnnnnnnnnnnnnnnnnnnnnnnnnnnnnnnnnnnnnnnnnnnnnnnnnnnnnnnnnnnnnnnnnnnnnnnnnnnnnnnnnnnnnnnnnnnnnnnnnnnnnnnnnnnnnnnnnnnnnnnnnnnnnnnnnnnnnnnnnnnnnnnnnnnnnnnnnnnnnnnnnnnnnnnnnnnnnnnnnnnnnnnnnnnnnnnnnnnnnnnnnnnnnnnnnnnnnnnnnnnnnnnnnnnnnnnnnnnnnnnnnnnnnnnnnnnnnnnnnnnnnnnnnnnnnnnnnnnnnnnnnnnnnnnnnnnnnnnnnnnnnnnnnnnnnnnnnnnnnnnnnnnnnnnnnnnnnnnnnnnnnnnnnnnnnnnnnnnnnnnnnnnnnnnnnnnnnnnnnnnnnnnnnnnnnnnnnnnnnnnnnnnnnnnnnnnnnnnnnnnnnnnnnnnnnnnnnnnnnnnnnnnnnnnnnnnnnnnnnnnnnnnnnnnnnnnnnnnnnnnnnnnnnnnnnnnnnnnnnnnnnnnnnnnnnnnnnnnnnnnnnnnnnnnnnnnnnnnnnnnnnnnnnnnnnnnnnnnnnnnnnnnnnnnnnnnnnnnnnnnnnnnnnnnnnnnnnnnnnnnnnnnnnnnnnnnnnnnnnnnnnnnnnnnnnnnnnnnnnnnnnnnnnnnnnnnnnnnnnnnnnnnnnnnnnnnnnnnnnnnnnnnnnnnnnnnnnnnnnnnnnnnnnnnnnnnnnnnnnnnnnnnnnnnnnnnnnnnnnnnnnnnnnnnnnnnnnnnnnnnnnnnnnnnnnnnnnnnnnnnnnnnnnnnnnnnnnnnnnnnnnnnnnnnnnnnnnnnnnnnnnnnnnnnnnnnnnnnnnnnnnnnnnnnnnnnnnnnnnnnnnnnnnnnnnnnnnnnnnnnnnnnnnnnnnnnnnnnnnnnnnnnnnnnnnnnnnnnnnnnnnnnnnnnnnnnnnnnnnnnnnnnnnnnnnnnnnnnnnnnnnnnnnnnnnnnnnnnnnnnnnnnnnnnnnnnnnnnnnnnnnnnnnnnnnnnnnnnnnnnnnnnnnnnnnnnnnnnnnnnnnnnnnnnnnnnnnnnnnnnnnnnnnnnnnnnnnnnnnnnnnnnnnnnnnnnnnnnnnnnnnnnnnnnnnnnnnnnnnnnnnnnnnnnnnnnnnnnnnnnnnnnnnnnnnnnnnnnnnnnnnnnnnnnnnnnnnnnnnnnnnnnnnnnnnnnnnnnnnnnnnnnnnnnnnnnnnnnnnnnnnnnnnnnnnnnnnnnnnnnnnnnnnnnnnnnnnnnnnnnnnnnnnnnnnnnnnnnnnnnnnnnnnnnnnnnnnnnnnnnnnnnnnnnnnnnnnnnnnnnnnnnnnnnnnnnnnnnnnnnnnnnnnnnnnnnnnnnnnnnnnnnnnnnnnnnnnnnnnnnnnnnnnnnnnnnnnnnnnnnnnnnnnnnnnnnnnnnnnnnnnnnnnnnnnnnnnnnnnnnnnnnnnnnnnnnnnnnnnnnnnnnnnnnnnnnnnnnnnnnnnnnnnnnnnnnnnnnnnnnnnnnnnnnnnnnnnnnnnnnnnnnnnnnnnnnnnnnnnnnnnnnnnnnnnnnnnnnnnnnnnnnnnnnnnnnnnnnnnnnnnnnnnnnnnnnnnnnnnnnnnnnnnnnnnnnnnnnnnnnnnnnnnnnnnnnnnnnnnnnnnnnnnnnnnnnnnnnnnnnnnnnnnnnnnnnnnnnnnnnnnnnnnnnnnnnnnnnnnnnnnnnnnnnnnnnnnnnnnnnnnnnnnnnnnnnnnnnnnnnnnnnnnnnnnnnnnnnnnnnnnnnnnnnnnnnnnnnnnnnnnnnnnnnnnnnnnnnnnnnnnnnnnnnnnnnnnnnnnnnnnnnnnnnnnnnnnnnnnnnnnnnnnnnnnnnnnnnnnnnnnnnnnnnnnnnnnnnnnnnnnnnnnnnnnnnnnnnnnnnnnnnnnnnnnnnnnnnnnnnnnnnnnnnnnnnnnnnnnnnnnnnnnnnnnnnnnnnnnnnnnnnnnnnnnnnnnnnnnnnnnnnnnnnnnnnnnnnnnnnnnnnnnnnnnnnnnnnnnnnnnnnnnnnnnnnnnnnnnnnnnnnnnnnnnnnnnnnnnnnnnnnnnnnnnnnnnnnnnnnnnnnnnnnnnnnnnnnnnnnnnnnnnnnnnnnnnnnnnnnnnnnnnnnnnnnnnnnnnnnnnnnnnnnnnnnnnnnnnnnnnnnnnnnnnnnnnnnnnnnnnnnnnnnnnnnnnnnnnnnnnnnnnnnnnnnnnnnnnnnnnnnnnnnnnnnnnnnnnnnnnnnnnnnnnnnnnnnnnnnnnnnnnnnnnnnnnnnnnnnnnnnnnnnnnnnnnnnnnnnnnnnnnnnnnnnnnnnnnnnnnnnnnnnnnnnnnnnnnnnnnnnnnnnnnnnnnnnnnnnnnnnnnnnnnnnnnnnnnnnnnnnnnnnnnnnnnnnnnnnnnnnnnnnnnnnnnnnnnnnnnnnnnnnnnnnnnnnnnnnnnnnnnnnnnnnnnnnnnnnnnnnnnnnnnnnnnnnnnnnnnnnnnnnnnnnnnnnnnnnnnnnnnnnnnnnnnnnnnnnnnnnnnnnnnnnnnnnnnnnnnnnnnnnnnnnnnnnnnnnnnnnnnnnnnnnnnnnnnnnnnnnnnnnnnnnnnnnnnnnnnnnnnnnnnnnnnnnnnnnnnnnnnnnnnnnnnnnnnnnnnnnnnnnnnnnnnnnnnnnnnnnnnnnnnnnnnnnnnnnnnnnnnnnnnnnnnnnnnnnnnnnnnnnnnnnnnnnnnnnnnnnnnnnnnnnnnnnnnnnnnnnnnnnnnnnnnnnnnnnnnnnnnnnnnnnnnnnnnnnnnnnnnnnnnnnnnnnnnnnnnnnnnnnnnnnnnnnnnnnnnnnnnnnnnnnnnnnnnnnnnnnnnnnnnnnnnnnnnnnnnnnnnnnnnnnnnnnnnnnnnnnnnnnnnnnnnnnnnnnnnnnnnnnnnnnnnnnnnnnnnnnnnnnnnnnnnnnnnnnnnnnnnnnnnnnnnnnnnnnnnnnnnnnnnnnnnnnnnnnnnnnnnnnnnnnnnnnnnnnnnnnnnnnnnnnnnnnnnnnnnnnnnnnnnnnnnnnnnnnnnnnnnnnnnnnnnnnnnnnnnnnnnnnnnnnnnnnnnnnnnnnnnnnnnnnnnnnnnnnnnnnnnnnnnnnnnnnnnnnnnnnnnnnnnnnnnnnnnnnnnnnnnnnnnnnnnnnnnnnnnnnnnnnnnnnnnnnnnnnnnnnnnnnnnnnnnnnnnnnnnnnnnnnnnnnnnnnnnnnnnnnnnnnnnnnnnnnnnnnnnnnnnnnnnnnnnnnnnnnnnnnnnnnnnnnnnnnnnnnnnnnnnnnnnnnnnnnnnnnnnnnnnnnnnnnnnnnnnnnnnnnnnnnnnnnnnnnnnnnnnnnnnnnnnnnnnnnnnnnnnnnnnnnnnnnnnnnnnnnnnnnnnnnnnnnnnnnnnnnnnnnnnnnnnnnnnnnnnnnnnnnnnnnnnnnnnnnnnnnnnnnnnnnnnnnnnnnnnnnnnnnnnnnnnnnnnnnnnnnnnnnnnnnnnnnnnnnnnnnnnnnnnnnnnnnnnnnnnnnnnnnnnnnnnnnnnnnnnnnnnnnnnnnnnnnnnnnnnnnnnnnnnnnnnnnnnnnnnnnnnnnnnnnnnnnnnnnnnnnnnnnnnnnnnnnnnnnnnnnnnnnnnnnnnnnnnnnnnnnnnnnnnnnnnnnnnnnnnnnnnnnnnnnnnnnnnnnnnnnnnnnnnnnnnnnnnnnnnnnnnnnnnnnnnnnnnnnnnnnnnnnnnnnnnnnnnnnnnnnnnnnnnnnnnnnnnnnnnnnnnnnnnnnnnnnnnnnnnnnnnnnnnnnnnnnnnnnnnnnnnnnnnnnnnnnnnnnnnnnnnnnnnnnnnnnnnnnnnnnnnnnnnnnnnnnnnnnnnnnnnnnnnnnnnnnnnnnnnnnnnnnnnnnnnnnnnnnnnnnnnnnnnnnnnnnnnnnnnnnnnnnnnnnnnnnnnnnnnnnnnnnnnnnnnnnnnnnnnnnnnnnnnnnnnnnnnnnnnnnnnnnnnnnnnnnnnnnnnnnnnnnnnnnnnnnnnnnnnnnnnnnnnnnnnnnnnnnnnnnnnnnnnnnnnnnnnnnnnnnnnnnnnnnnnnnnnnnnnnnnnnnnnnnnnnnnnnnnnnnnnnnnnnnnnnnnnnnnnnnnnnnnnnnnnnnnnnnnnnnnnnnnnnnnnnnnnnnnnnnnnnnnnnnnnnnnnnnnnnnnnnnnnnnnnnnnnnnnnnnnnnnnnnnnnnnnnnnnnnnnnnnnnnnnnnnnnnnnnnnnnnnnnnnnnnnnnnnnnnnnnnnnnnnnnnnnnnnnnnnnnnnnnnnnnnnnnnnnnnnnnnnnnnnnnnnnnnnnnnnnnnnnnnnnnnnnnnnnnnnnnnnnnnnnnnnnnnnnnnnnnnnnnnnnnnnnnnnnnnnnnnnnnnnnnnnnnnnnnnnnnnnnnnnnnnnnnnnnnnnnnnnnnnnnnnnnnnnnnnnnnnnnnnnnnnnnnnnnnnnnnnnnnnnnnnnnnnnnnnnnnnnnnnnnnnnnnnnnnnnnnnnnnnnnnnnnnnnnnnnnnnnnnnnnnnnnnnnnnnnnnnnnnnnnnnnnnnnnnnnnnnnnnnnnnnnnnnnnnnnnnnnnnnnnnnnnnnnnnnnnnnnnnnnnnnnnnnnnnnnnnnnnnnnnnnnnnnnnnnnnnnnnnnnnnnnnnnnnnnnnnnnnnnnnnnnnnnnnnnnnnnnnnnnnnnnnnnnnnnnnnnnnnnnnnnnnnnnnnnnnnnnnnnnnnnnnnnnnnnnnnnnnnnnnnnnnnnnnnnnnnnnnnnnnnnnnnnnnnnnnnnnnnnnnnnnnnnnnnnnnnnnnnnnnnnnnnnnnnnnnnnnnnnnnnnnnnnnnnnnnnnnnnnnnnnnnnnnnnnnnnnnnnnnnnnnnnnnnnnnnnnnnnnnnnnnnnnnnnnnnnnnnnnnnnnnnnnnnnnnnnnnnnnnnnnnnnnnnnnnnnnnnnnnnnnnnnnnnnnnnnnnnnnnnnnnnnnnnnnnnnnnnnnnnnnnnnnnnnnnnnnnnnnnnnnnnnnnnnnnnnnnnnnnnnnnnnnnnnnnnnnnnnnnnnnnnnnnnnnnnnnnnnnnnnnnnnnnnnnnnnnnnnnnnnnnnnnnnnnnnnnnnnnnnnnnnnnnnnnnnnnnnnnnnnnnnnnnnnnnnnnnnnnnnnnnnnnnnnnnnnnnnnnnnnnnnnnnnnnnnnnnnnnnnnnnnnnnnnnnnnnnnnnnnnnnnnnnnnnnnnnnnnnnnnnnnnnnnnnnnnnnnnnnnnnnnnnnnnnnnnnnnnnnnnnnnnnnnnnnnnnnnnnnnnnnnnnnnnnnnnnnnnnnnnnnnnnnnnnnnnnnnnnnnnnnnnnnnnnnnnnnnnnnnnnnnnnnnnnnnnnnnnnnnnnnnnnnnnnnnnnnnnnnnnnnnnnnnnnnnnnnnnnnnnnnnnnnnnnnnnnnnnnnnnnnnnnnnnnnnnnnnnnnnnnnnnnnnnnnnnnnnnnnnnnnnnnnnnnnnnnnnnnnnnnnnnnnnnnnnnnnnnnnnnnnnnnnnnnnnnnnnnnnnnnnnnnnnnnnnnnnnnnnnnnnnnnnnnnnnnnnnnnnnnnnnnnnnnnnnnnnnnnnnnnnnnnnnnnnnnnnnnnnnnnnnnnnnnnnnnnnnnnnnnnnnnnnnnnnnnnnnnnnnnnnnnnnnnnnnnnnnnnnnnnnnnnnnnnnnnnnnnnnnnnnnnnnnnnnnnnnnnnnnnnnnnnnnnnnnnnnnnnnnnnnnnnnnnnnnnnnnnnnnnnnnnnnnnnnnnnnnnnnnnnnnnnnnnnnnnnnnnnnnnnnnnnnnnnnnnnnnnnnnnnnnnnnnnnnnnnnnnnnnnnnnnnnnnnnnnnnnnnnnnnnnnnnnnnnnnnnnnnnnnnnnnnnnnnnnnnnnnnnnnnnnnnnnnnnnnnnnnnnnnnnnnnnnnnnnnnnnnnnnnnnnnnnnnnnnnnnnnnnnnnnnnnnnnnnnnnnnnnnnnnnnnnnnnnnnnnnnnnnnnnnnnnnnnnnnnnnnnnnnnnnnnnnnnnnnnnnnnnnnnnnnnnnnnnnnnnnnnnnnnnnnnnnnnnnnnnnnnnnnnnnnnnnnnnnnnnnnnnnnnnnnnnnnnnnnnnnnnnnnnnnnnnnnnnnnnnnnnnnnnnnnnnnnnnnnnnnnnnnnnnnnnnnnnnnnnnnnnnnnnnnnnnnnnnnnnnnnnnnnnnnnnnnnnnnnnnnnnnnnnnnnnnnnnnnnnnnnnnnnnnnnnnnnnnnnnnnnnnnnnnnnnnnnnnnnnnnnnnnnnnnnnnnnnnnnnnnnnnnnnnnnnnnnnnnnnnnnnnnnnnnnnnnnnnnnnnnnnnnnnnnnnnnnnnnnnnnnnnnnnnnnnnnnnnnnnnnnnnnnnnnnnnnnnnnnnnnnnnnnnnnnnnnnnnnnnnnnnnnnnnnnnnnnnnnnnnnnnnnnnnnnnnnnnnnnnnnnnnnnnnnnnnnnnnnnnnnnnnnnnnnnnnnnnnnnnnnnnnnnnnnnnnnnnnnnnnnnnnnnnnnnnnnnnnnnnnnnnnnnnnnnnnnnnnnnnnnnnnnnnnnnnnnnnnnnnnnnnnnnnnnnnnnnnnnnnnnnnnnnnnnnnnnnnnnnnnnnnnnnnnnnnnnnnnnnnnnnnnnnnnnnnnnnnnnnnnnnnnnnnnnnnnnnnnnnnnnnnnnnnnnnnnnnnnnnnnnnnnnnnnnnnnnnnnnnnnnnnnnnnnnnnnnnnnnnnnnnnnnnnnnnnnnnnnnnnnnnnnnnnnnnnnnnnnnnnnnnnnnnnnnnnnnnnnnnnnnnnnnnnnnnnnnnnnnnnnnnnnnnnnnnnnnnnnnnnnnnnnnnnnnnnnnnnnnnnnnnnnnnnnnnnnnnnnnnnnnnnnnnnnnnnnnnnnnnnnnnnnnnnnnnnnnnnnnnnnnnnnnnnnnnnnnnnnnnnnnnnnnnnnnnnnnnnnnnnnnnnnnnnnnnnnnnnnnnnnnnnnnnnnnnnnnnnnnnnnnnnnnnnnnnnnnnnnnnnnnnnnnnnnnnnnnnnnnnnnnnnnnnnnnnnnnnnnnnnnnnnnnnnnnnnnnnnnnnnnnnnnnnnnnnnnnnnnnnnnnnnnnnnnnnnnnnnnnnnnnnnnnnnnnnnnnnnnnnnnnnnnnnnnnnnnnnnnnnnnnnnnnnnnnnnnnnnnnnnnnnnnnnnnnnnnnnnnnnnnnnnnnnnnnnnnnnnnnnnnnnnnnnnnnnnnnnnnnnnnnnnnnnnnnnnnnnnnnnnnnnnnnnnnnnnnnnnnnnnnnnnnnnnnnnnnnnnnnnnnnnnnnnnnnnnnnnnnnnnnnnnnnnnnnnnnnnnnnnnnnnnnnnnnnnnnnnnnnnnnnnnnnnnnnnnnnnnnnnnnnnnnnnnnnnnnnnnnnnnnnnnnnnnnnnnnnnnnnnnnnnnnnnnnnnnnnnnnnnnnnnnnnnnnnnnnnnnnnnnnnnnnnnnnnnnnnnnnnnnnnnnnnnnnnnnnnnnnnnnnnnnnnnnnnnnnnnnnnnnnnnnnnnnnnnnnnnnnnnnnnnnnnnnnnnnnnnnnnnnnnnnnnnnnnnnnnnnnnnnnnnnnnnnnnnnnnnnnnnnnnnnnnnnnnnnnnnnnnnnnnnnnnnnnnnnnnnnnnnnnnnnnnnnnnnnnnnnnnnnnnnnnnnnnnnnnnnnnnnnnnnnnnnnnnnnnnnnnnnnnnnnnnnnnnnnnnnnnnnnnnnnnnnnnnnnnnnnnnnnnnnnnnnnnnnnnnnnnnnnnnnnnnnnnnnnnnnnnnnnnnnnnnnnnnnnnnnnnnnnnnnnnnnnnnnnnnnnnnnnnnnnnnnnnnnnnnnnnnnnnnnnnnnnnnnnnnnnnnnnnnnnnnnnnnnnnnnnnnnnnnnnnnnnnnnnnnnnnnnnnnnnnnnnnnnnnnnnnnnnnnnnnnnnnnnnnnnnnnnnnnnnnnnnnnnnnnnnnnnnnnnnnnnnnnnnnnnnnnnnnnnnnnnnnnnnnnnnnnnnnnnnnnnnnnnnnnnnnnnnnnnnnnnnnnnnnnnnnnnnnnnnnnnnnnnnnnnnnnnnnnnnnnnnnnnnnnnnnnnnnnnnnnnnnnnnnnnnnnnnnnnnnnnnnnnnnnnnnnnnnnnnnnnnnnnnnnnnnnnnnnnnnnnnnnnnnnnnnnnnnnnnnnnnnnnnnnnnnnnnnnnnnnnnnnnnnnnnnnnnnnnnnnnnnnnnnnnnnnnnnnnnnnnnnnnnnnnnnnnnnnnnnnnnnnnnnnnnnnnnnnnnnnnnnnnnnnnnnnnnnnnnnnnnnnnnnnnnnnnnnnnnnnnnnnnnnnnnnnnnnnnnnnnnnnnnnnnnnnnnnnnnnnnnnnnnnnnnnnnnnnnnnnnnnnnnnnnnnnnnnnnnnnnnnnnnnnnnnnnnnnnnnnnnnnnnnnnnnnnnnnnnnnnnnnnnnnnnnnnnnnnnnnnnnnnnnnnnnnnnnnnnnnnnnnnnnnnnnnnnnnnnnnnnnnnnnnnnnnnnnnnnnnnnnnnnnnnnnnnnnnnnnnnnnnnnnnnnnnnnnnnnnnnnnnnnnnnnnnnnnnnnnnnnnnnnnnnnnnnnnnnnnnnnnnnnnnnnnnnnnnnnnnnnnnnnnnnnnnnnnnnnnnnnnnnnnnnnnnnnnnnnnnnnnnnnnnnnnnnnnnnnnnnnnnnnnnnnnnnnnnnnnnnnnnnnnnnnnnnnnnnnnnnnnnnnnnnnnnnnnnnnnnnnnnnnnnnnnnnnnnnnnnnnnnnnnnnnnnnnnnnnnnnnnnnnnnnnnnnnnnnnnnnnnnnnnnnnnnnnnnnnnnnnnnnnnnnnnnnnnnnnnnnnnnnnnnnnnnnnnnnnnnnnnnnnnnnnnnnnnnnnnnnnnnnnnnnnnnnnnnnnnnnnnnnnnnnnnnnnnnnnnnnnnnnnnnnnnnnnnnnnnnnnnnnnnnnnnnnnnnnnnnnnnnnnnnnnnnnnnnnnnnnnnnnnnnnnnnnnnnnnnnnnnnnnnnnnnnnnnnnnnnnnnnnnnnnnnnnnnnnnnnnnnnnnnnnnnnnnnnnnnnnnnnnnnnnnnnnnnnnnnnnnnnnnnnnnnnnnnnnnnnnnnnnnnnnnnnnnnnnnnnnnnnnnnnnnnnnnnnnnnnnnnnnnnnnnnnnnnnnnnnnnnnnnnnnnnnnnnnnnnnnnnnnnnnnnnnnnnnnnnnnnnnnnnnnnnnnnnnnnnnnnnnnnnnnnnnnnnnnnnnnnnnnnnnnnnnnnnnnnnnnnnnnnnnnnnnnnnnnnnnnnnnnnnnnnnnnnnnnnnnnnnnnnnnnnnnnnnnnnnnnnnnnnnnnnnnnnnnnnnnnnnnnnnnnnnnnnnnnnnnnnnnnnnnnnnnnnnnnnnnnnnnnnnnnnnnnnnnnnnnnnnnnnnnnnnnnnnnnnnnnnnnnnnnnnnnnnnnnnnnnnnnnnnnnnnnnnnnnnnnnnnnnnnnnnnnnnnnnnnnnnnnnnnnnnnnnnnnnnnnnnnnnnnnnnnnnnnnnnnnnnnnnnnnnnnnnnnnnnnnnnnnnnnnnnnnnnnnnnnnnnnnnnnnnnnnnnnnnnnnnnnnnnnnnnnnnnnnnnnnnnnnnnnnnnnnnnnnnnnnnnnnnnnnnnnnnnnnnnnnnnnnnnnnnnnnnnnnnnnnnnnnnnnnnnnnnnnnnnnnnnnnnnnnnnnnnnnnnnnnnnnnnnnnnnnnnnnnnnnnnnnnnnnnnnnnnnnnnnnnnnnnnnnnnnnnnnnnnnnnnnnnnnnnnnnnnnnnnnnnnnnnnnnnnnnnnnnnnnnnnnnnnnnnnnnnnnnnnnnnnnnnnnnnnnnnnnnnnnnnnnnnnnnnnnnnnnnnnnnnnnnnnnnnnnnnnnnnnnnnnnnnnnnnnnnnnnnnnnnnnnnnnnnnnnnnnnnnnnnnnnnnnnnnnnnnnnnnnnnnnnnnnnnnnnnnnnnnnnnnnnnnnnnnnnnnnnnnnnnnnnnnnnnnnnnnnnnnnnnnnnnnnnnnnnnnnnnnnnnnnnnnnnnnnnnnnnnnnnnnnnnnnnnnnnnnnnnnnnnnnnnnnnnnnnnnnnnnnnnnnnnnnnnnnnnnnnnnnnnnnnnnnnnnnnnnnnnnnnnnnnnnnnnnnnnnnnnnnnnnnnnnnnnnnnnnnnnnnnnnnnnnnnnnnnnnnnnnnnnnnnnnnnnnnnnnnnnnnnnnnnnnnnnnnnnnnnnnnnnnnnnnnnnnnnnnnnnnnnnnnnnnnnnnnnnnnnnnnnnnnnnnnnnnnnnnnnnnnnnnnnnnnnnnnnnnnnnnnnnnnnnnnnnnnnnnnnnnnnnnnnnnnnnnnnnnnnnnnnnnnnnnnnnnnnnnnnnnnnnnnnnnnnnnnnnnnnnnnnnnnnnnnnnnnnnnnnnnnnnnnnnnnnnnnnnnnnnnnnnnnnnnnnnnnnnnnnnnnnnnnnnnnnnnnnnnnnnnnnnnnnnnnnnnnnnnnnnnnnnnnnnnnnnnnnnnnnnnnnnnnnnnnnnnnnnnnnnnnnnnnnnnnnnnnnnnnnnnnnnnnnnnnnnnnnnnnnnnnnnnnnnnnnnnnnnnnnnnnnnnnnnnnnnnnnnnnnnnnnnnnnnnnnnnnnnnnnnnnnnnnnnnnnnnnnnnnnnnnnnnnnnnnnnnnnnnnnnnnnnnnnnnnnnnnnnnnnnnnnnnnnnnnnnnnnnnnnnnnnnnnnnnnnnnnnnnnnnnnnnnnnnnnnnnnnnnnnnnnnnnnnnnnnnnnnnnnnnnnnnnnnnnnnnnnnnnnnnnnnnnnnnnnnnnnnnnnnnnnnnnnnnnnnnnnnnnnnnnnnnnnnnnnnnnnnnnnnnnnnnnnnnnnnnnnnnnnnnnnnnnnnnnnnnnnnnnnnnnnnnnnnnnnnnnnnnnnnnnnnnnnnnnnnnnnnnnnnnnnnnnnnnnnnnnnnnnnnnnnnnnnnnnnnnnnnnnnnnnnnnnnnnnnnnnnnnnnnnnnnnnnnnnnnnnnnnnnnnnnnnnnnnnnnnnnnnnnnnnnnnnnnnnnnnnnnnnnnnnnnnnnnnnnnnnnnnnnnnnnnnnnnnnnnnnnnnnnnnnnnnnnnnnnnnnnnnnnnnnnnnnnnnnnnnnnnnnnnnnnnnnnnnnnnnnnnnnnnnnnnnnnnnnnnnnnnnnnnnnnnnnnnnnnnnnnnnnnnnnnnnnnnnnnnnnnnnnnnnnnnnnnnnnnnnnnnnnnnnnnnnnnnnnnnnnnnnnnnnnnnnnnnnnnnnnnnnnnnnnnnnnnnnnnnnnnnnnnnnnnnnnnnnnnnnnnnnnnnnnnnnnnnnnnnnnnnnnnnnnnnnnnnnnnnnnnnnnnnnnnnnnnnnnnnnnnnnnnnnnnnnnnnnnnnnnnnnnnnnnnnnnnnnnnnnnnnnnnnnnnnnnnnnnnnnnnnnnnnnnnnnnnnnnnnnnnnnnnnnnnnnnnnnnnnnnnnnnnnnnnnnnnnnnnnnnnnnnnnnnnnnnnnnnnnnnnnnnnnnnnnnnnnnnnnnnnnnnnnnnnnnnnnnnnnnnnnnnnnnnnnnnnnnnnnnnnnnnnnnnnnnnnnnnnnnnnnnnnnnnnnnnnnnnnnnnnnnnnnnnnnnnnnnnnnnnnnnnnnnnnnnnnnnnnnnnnnnnnnnnnnnnnnnnnnnnnnnnnnnnnnnnnnnnnnnnnnnnnnnnnnnnnnnnnnnnnnnnnnnnnnnnnnnnnnnnnnnnnnnnnnnnnnnnnnnnnnnnnnnnnnnnnnnnnnnnnnnnnnnnnnnnnnnnnnnnnnnnnnnnnnnnnnnnnnnnnnnnnnnnnnnnnnnnnnnnnnnnnnnnnnnnnnnnnnnnnnnnnnnnnnnnnnnnnnnnnnnnnnnnnnnnnnnnnnnnnnnnnnnnnnnnnnnnnnnnnnnnnnnnnnnnnnnnnnnnnnnnnnnnnnnnnnnnnnnnnnnnnnnnnnnnnnnnnnnnnnnnnnnnnnnnnnnnnnnnnnnnnnnnnnnnnnnnnnnnnnnnnnnnnnnnnnnnnnnnnnnnnnnnnnnnnnnnnnnnnnnnnnnnnnnnnnnnnnnnnnnnnnnnnnnnnnnnnnnnnnnnnnnnnnnnnnnnnnnnnnnnnnnnnnnnnnnnnnnnnnnnnnnnnnnnnnnnnnnnnnnnnnnnnnnnnnnnnnnnnnnnnnnnnnnnnnnnnnnnnnnnnnnnnnnnnnnnnnnnnnnnnnnnnnnnnnnnnnnnnnnnnnnnnnnnnnnnnnnnnnnnnnnnnnnnnnnnnnnnnnnnnnnnnnnnnnnnnnnnnnnnnnnnnnnnnnnnnnnnnnnnnnnnnnnnnnnnnnnnnnnnnnnnnnnnnnnnnnnnnnnnnnnnnnnnnnnnnnnnnnnnnnnnnnnnnnnnnnnnnnnnnnnnnnnnnnnnnnnnnnnnnnnnnnnnnnnnnnnnnnnnnnnnnnnnnnnnnnnnnnnnnnnnnnnnnnnnnnnnnnnnnnnnnnnnnnnnnnnnnnnnnnnnnnnnnnnnnnnnnnnnnnnnnnnnnnnnnnnnnnnnnnnnnnnnnnnnnnnnnnnnnnnnnnnnnnnnnnnnnnnnnnnnnnnnnnnnnnnnnnnnnnnnnnnnnnnnnnnnnnnnnnnnnnnnnnnnnnnnnnnnnnnnnnnnnnnnnnnnnnnnnnnnnnnnnnnnnnnnnnnnnnnnnnnnnnnnnnnnnnnnnnnnnnnnnnnnnnnnnnnnnnnnnnnnnnnnnnnnnnnnnnnnnnnnnnnnnnnnnnnnnnnnnnnnnnnnnnnnnnnnnnnnnnnnnnnnnnnnnnnnnnnnnnnnnnnnnnnnnnnnnnnnnnnnnnnnnnnnnnnnnnnnnnnnnnnnnnnnnnnnnnnnnnnnnnnnnnnnnnnnnnnnnnnnnnnnnnnnnnnnnnnnnnnnnnnnnnnnnnnnnnnnnnnnnnnnnnnnnnnnnnnnnnnnnnnnnnnnnnnnnnnnnnnnnnnnnnnnnnnnnnnnnnnnnnnnnnnnnnnnnnnnnnnnnnnnnnnnnnnnnnnnnnnnnnnnnnnnnnnnnnnnnnnnnnnnnnnnnnnnnnnnnnnnnnnnnnnnnnnnnnnnnnnnnnnnnnnnnnnnnnnnnnnnnnnnnnnnnnnnnnnnnnnnnnnnnnnnnnnnnnnnnnnnnnnnnnnnnnnnnnnnnnnnnnnnnnnnnnnnnnnnnnnnnnnnnnnnnnnnnnnnnnnnnnnnnnnnnnnnnnnnnnnnnnnnnnnnnnnnnnnnnnnnnnnnnnnnnnnnnnnnnnnnnnnnnnnnnnnnnnnnnnnnnnnnnnnnnnnnnnnnnnnnnnnnnnnnnnnnnnnnnnnnnnnnnnnnnnnnnnnnnnnnnnnnnnnnnnnnnnnnnnnnnnnnnnnnnnnnnnnnnnnnnnnnnnnnnnnnnnnnnnnnnnnnnnnnnnnnnnnnnnnnnnnnnnnnnnnnnnnnnnnnnnnnnnnnnnnnnnnnnnnnnnnnnnnnnnnnnnnnnnnnnnnnnnnnnnnnnnnnnnnnnnnnnnnnnnnnnnnnnnnnnnnnnnnnnnnnnnnnnnnnnnnnnnnnnnnnnnnnnnnnnnnnnnnnnnnnnnnnnnnnnnnnnnnnnnnnnnnnnnnnnnnnnnnnnnnnnnnnnnnnnnnnnnnnnnnnnnnnnnnnnnnnnnnnnnnnnnnnnnnnnnnnnnnnnnnnnnnnnnnnnnnnnnnnnnnnnnnnnnnnnnnnnnnnnnnnnnnnnnnnnnnnnnnnnnnnnnnnnnnnnnnnnnnnnnnnnnnnnnnnnnnnnnnnnnnnnnnnnnnnnnnnnnnnnnnnnnnnnnnnnnnnnnnnnnnnnnnnnnnnnnnnnnnnnnnnnnnnnnnnnnnnnnnnnnnnnnnnnnnnnnnnnnnnnnnnnnnnnnnnnnnnnnnnnnnnnnnnnnnnnnnnnnnnnnnnnnnnnnnnnnnnnnnnnnnnnnnnnnnnnnnnnnnnnnnnnnnnnnnnnnnnnnnnnnnnnnnnnnnnnnnnnnnnnnnnnnnnnnnnnnnnnnnnnnnnnnnnnnnnnnnnnnnnnnnnnnnnnnnnnnnnnnnnnnnnnnnnnnnnnnnnnnnnnnnnnnnnnnnnnnnnnnnnnnnnnnnnnnnnnnnnnnnnnnnnnnnnnnnnnnnnnnnnnnnnnnnnnnnnnnnnnnnnnnnnnnnnnnnnnnnnnnnnnnnnnnnnnnnnnnnnnnnnnnnnnnnnnnnnnnnnnnnnnnnnnnnnnnnnnnnnnnnnnnnnnnnnnnnnnnnnnnnnnnnnnnnnnnnnnnnnnnnnnnnnnnnnnnnnnnnnnnnnnnnnnnnnnnnnnnnnnnnnnnnnnnnnnnnnnnnnnnnnnnnnnnnnnnnnnnnnnnnnnnnnnnnnnnnnnnnnnnnnnnnnnnnnnnnnnnnnnnnnnnnnnnnnnnnnnnnnnnnnnnnnnnnnnnnnnnnnnnnnnnnnnnnnnnnnnnnnnnnnnnnnnnnnnnnnnnnnnnnnnnnnnnnnnnnnnnnnnnnnnnnnnnnnnnnnnnnnnnnnnnnnnnnnnnnnnnnnnnnnnnnnnnnnnnnnnnnnnnnnnnnnnnnnnnnnnnnnnnnnnnnnnnnnnnnnnnnnnnnnnnnnnnnnnnnnnnnnnnnnnnnnnnnnnnnnnnnnnnnnnnnnnnnnnnnnnnnnnnnnnnnnnnnnnnnnnnnnnnnnnnnnnnnnnnnnnnnnnnnnnnnnnnnnnnnnnnnnnnnnnnnnnnnnnnnnnnnnnnnnnnnnnnnnnnnnnnnnnnnnnnnnnnnnnnnnnnnnnnnnnnnnnnnnnnnnnnnnnnnnnnnnnnnnnnnnnnnnnnnnnnnnnnnnnnnnnnnnnnnnnnnnnnnnnnnnnnnnnnnnnnnnnnnnnnnnnnnnnnnnnnnnnnnnnnnnnnnnnnnnnnnnnnnnnnnnnnnnnnnnnnnnnnnnnnnnnnnnnnnnnnnnnnnnnnnnnnnnnnnnnnnnnnnnnnnnnnnnnnnnnnnnnnnnnnnnnnnnnnnnnnnnnnnnnnnnnnnnnnnnnnnnnnnnnnnnnnnnnnnnnnnnnnnnnnnnnnnnnnnnnnnnnnnnnnnnnnnnnnnnnnnnnnnnnnnnnnnnnnnnnnnnnnnnnnnnnnnnnnnnnnnnnnnnnnnnnnnnnnnnnnnnnnnnnnnnnnnnnnnnnnnnnnnnnnnnnnnnnnnnnnnnnnnnnnnnnnnnnnnnnnnnnnnnnnnnnnnnnnnnnnnnnnnnnnnnnnnnnnnnnnnnnnnnnnnnnnnnnnnnnnnnnnnnnnnnnnnnnnnnnnnnnnnnnnnnnnnnnnnnnnnnnnnnnnnnnnnnnnnnnnnnnnnnnnnnnnnnnnnnnnnnnnnnnnnnnnnnnnnnnnnnnnnnnnnnnnnnnnnnnnnnnnnnnnnnnnnnnnnnnnnnnnnnnnnnnnnnnnnnnnnnnnnnnnnnnnnnnnnnnnnnnnnnnnnnnnnnnnnnnnnnnnnnnnnnnnnnnnnnnnnnnnnnnnnnnnnnnnnnnnnnnnnnnnnnnnnnnnnnnnnnnnnnnnnnnnnnnnnnnnnnnnnnnnnnnnnnnnnnnnnnnnnnnnnnnnnnnnnnnnnnnnnnnnnnnnnnnnnnnnnnnnnnnnnnnnnnnnnnnnnnnnnnnnnnnnnnnnnnnnnnnnnnnnnnnnnnnnnnnnnnnnnnnnnnnnnnnnnnnnnnnnnnnnnnnnnnnnnnnnnnnnnnnnnnnnnnnnnnnnnnnnnnnnnnnnnnnnnnnnnnnnnnnnnnnnnnnnnnnnnnnnnnnnnnnnnnnnnnnnnnnnnnnnnnnnnnnnnnnnnnnnnnnnnnnnnnnnnnnnnnnnnnnnnnnnnnnnnnnnnnnnnnnnnnnnnnnnnnnnnnnnnnnnnnnnnnnnnnnnnnnnnnnnnnnnnnnnnnnnnnnnnnnnnnnnnnnnnnnnnnnnnnnnnnnnnnnnnnnnnnnnnnnnnnnnnnnnnnnnnnnnnnnnnnnnnnnnnnnnnnnnnnnnnnnnnnnnnnnnnnnnnnnnnnnnnnnnnnnnnnnnnnnnnnnnnnnnnnnnnnnnnnnnnnnnnnnnnnnnnnnnnnnnnnnnnnnnnnnnnnnnnnnnnnnnnnnnnnnnnnnnnnnnnnnnnnnnnnnnnnnnnnnnnnnnnnnnnnnnnnnnnnnnnnnnnnnnnnnnnnnnnnnnnnnnnnnnnnnnnnnnnnnnnnnnnnnnnnnnnnnnnnnnnnnnnnnnnnnnnnnnnnnnnnnnnnnnnnnnnnnnnnnnnnnnnnnnnnnnnnnnnnnnnnnnnnnnnnnnnnnnnnnnnnnnnnnnnnnnnnnnnnnnnnnnnnnnnnnnnnnnnnnnnnnnnnnnnnnnnnnnnnnnnnnnnnnnnnnnnnnnnnnnnnnnnnnnnnnnnnnnnnnnnnnnnnnnnnnnnnnnnnnnnnnnnnnnnnnnnnnnnnnnnnnnnnnnnnnnnnnnnnnnnnnnnnnnnnnnnnnnnnnnnnnnnnnnnnnnnnnnnnnnnnnnnnnnnnnnnnnnnnnnnnnnnnnnnnnnnnnnnnnnnnnnnnnnnnnnnnnnnnnnnnnnnnnnnnnnnnnnnnnnnnnnnnnnnnnnnnnnnnnnnnnnnnnnnnnnnnnnnnnnnnnnnnnnnnnnnnnnnnnnnnnnnnnnnnnnnnnnnnnnnnnnnnnnnnnnnnnnnnnnnnnnnnnnnnnnnnnnnnnnnnnnnnnnnnnnnnnnnnnnnnnnnnnnnnnnnnnnnnnnnnnnnnnnnnnnnnnnnnnnnnnnnnnnnnnnnnnnnnnnnnnnnnnnnnnnnnnnnnnnnnnnnnnnnnnnnnnnnnnnnnnnnnnnnnnnnnnnnnnnnnnnnnnnnnnnnnnnnnnnnnnnnnnnnnnnnnnnnnnnnnnnnnnnnnnnnnnnnnnnnnnnnnnnnnnnnnnnnnnnnnnnnnnnnnnnnnnnnnnnnnnnnnnnnnnnnnnnnnnnnnnnnnnnnnnnnnnnnnnnnnnnnnnnnnnnnnnnnnnnnnnnnnnnnnnnnnnnnnnnnnnnnnnnnnnnnnnnnnnnnnnnnnnnnnnnnnnnnnnnnnnnnnnnnnnnnnnnnnnnnnnnnnnnnnnnnnnnnnnnnnnnnnnnnnnnnnnnnnnnnnnnnnnnnnnnnnnnnnnnnnnnnnnnnnnnnnnnnnnnnnnnnnnnnnnnnnnnnnnnnnnnnnnnnnnnnnnnnnnnnnnnnnnnnnnnnnnnnnnnnnnnnnnnnnnnnnnnnnnnnnnnnnnnnnnnnnnnnnnnnnnnnnnnnnnnnnnnnnnnnnnnnnnnnnnnnnnnnnnnnnnnnnnnnnnnnnnnnnnnnnnnnnnnnnnnnnnnnnnnnnnnnnnnnnnnnnnnnnnnnnnnnnnnnnnnnnnnnnnnnnnnnnnnnnnnnnnnnnnnnnnnnnnnnnnnnnnnnnnnnnnnnnnnnnnnnnnnnnnnnnnnnnnnnnnnnnnnnnnnnnnnnnnnnnnnnnnnnnnnnnnnnnnnnnnnnnnnnnnnnnnnnnnnnnnnnnnnnnnnnnnnnnnnnnnnnnnnnnnnnnnnnnnnnnnnnnnnnnnnnnnnnnnnnnnnnnnnnnnnnnnnnnnnnnnnnnnnnnnnnnnnnnnnnnnnnnnnnnnnnnnnnnnnnnnnnnnnnnnnnnnnnnnnnnnnnnnnnnnnnnnnnnnnnnnnnnnnnnnnnnnnnnnnnnnnnnnnnnnnnnnnnnnnnnnnnnnnnnnnnnnnnnnnnnnnnnnnnnnnnnnnnnnnnnnnnnnnnnnnnnnnnnnnnnnnnnnnnnnnnnnnnnnnnnnnnnnnnnnnnnnnnnnnnnnnnnnnnnnnnnnnnnnnnnnnnnnnnnnnnnnnnnnnnnnnnnnnnnnnnnnnnnnnnnnnnnnnnnnnnnnnnnnnnnnnnnnnnnnnnnnnnnnnnnnnnnnnnnnnnnnnnnnnnnnnnnnnnnnnnnnnnnnnnnnnnnnnnnnnnnnnnnnnnnnnnnnnnnnnnnnnnnnnnnnnnnnnnnnnnnnnnnnnnnnnnnnnnnnnnnnnnnnnnnnnnnnnnnnnnnnnnnnnnnnnnnnnnnnnnnnnnnnnnnnnnnnnnnnnnnnnnnnnnnnnnnnnnnnnnnnnnnnnnnnnnnnnnnnnnnnnnnnnnnnnnnnnnnnnnnnnnnnnnnnnnnnnnnnnnnnnnnnnnnnnnnnnnnnnnnnnnnnnnnnnnnnnnnnnnnnnnnnnnnnnnnnnnnnnnnnnnnnnnnnnnnnnnnnnnnnnnnnnnnnnnnnnnnnnnnnnnnnnnnnnnnnnnnnnnnnnnnnnnnnnnnnnnnnnnnnnnnnnnnnnnnnnnnnnnnnnnnnnnnnnnnnnnnnnnnnnnnnnnnnnnnnnnnnnnnnnnnnnnnnnnnnnnnnnnnnnnnnnnnnnnnnnnnnnnnnnnnnnnnnnnnnnnnnnnnnnnnnnnnnnnnnnnnnnnnnnnnnnnnnnnnnnnnnnnnnnnnnnnnnnnnnnnnnnnnnnnnnnnnnnnnnnnnnnnnnnnnnnnnnnnnnnnnnnnnnnnnnnnnnnnnnnnnnnnnnnnnnnnnnnnnnnnnnnnnnnnnnnnnnnnnnnnnnnnnnnnnnnnnnnnnnnnnnnnnnnnnnnnnnnnnnnnnnnnnnnnnnnnnnnnnnnnnnnnnnnnnnnnnnnnnnnnnnnnnnnnnnnnnnnnnnnnnnnnnnnnnnnnnnnnnnnnnnnnnnnnnnnnnnnnnnnnnnnnnnnnnnnnnnnnnnnnnnnnnnnnnnnnnnnnnnnnnnnnnnnnnnnnnnnnnnnnnnnnnnnnnnnnnnnnnnnnnnnnnnnnnnnnnnnnnnnnnnnnnnnnnnnnnnnnnnnnnnnnnnnnnnnnnnnnnnnnnnnnnnnnnnnnnnnnnnnnnnnnnnnnnnnnnnnnnnnnnnnnnnnnnnnnnnnnnnnnnnnnnnnnnnnnnnnnnnnnnnnnnnnnnnnnnnnnnnnnnnnnnnnnnnnnnnnnnnnnnnnnnnnnnnnnnnnnnnnnnnnnnnnnnnnnnnnnnnnnnnnnnnnnnnnnnnnnnnnnnnnnnnnnnnnnnnnnnnnnnnnnnnnnnnnnnnnnnnnnnnnnnnnnnnnnnnnnnnnnnnnnnnnnnnnnnnnnnnnnnnnnnnnnnnnnnnnnnnnnnnnnnnnnnnnnnnnnnnnnnnnnnnnnnnnnnnnnnnnnnnnnnnnnnnnnnnnnnnnnnnnnnnnnnnnnnnnnnnnnnnnnnnnnnnnnnnnnnnnnnnnnnnnnnnnnnnnnnnnnnnnnnnnnnnnnnnnnnnnnnnnnnnnnnnnnnnnnnnnnnnnnnnnnnnnnnnnnnnnnnnnnnnnnnnnnnnnnnnnnnnnnnnnnnnnnnnnnnnnnnnnnnnnnnnnnnnnnnnnnnnnnnnnnnnnnnnnnnnnnnnnnnnnnnnnnnnnnnnnnnnnnnnnnnnnnnnnnnnnnnnnnnnnnnnnnnnnnnnnnnnnnnnnnnnnnnnnnnnnnnnnnnnnnnnnnnnnnnnnnnnnnnnnnnnnnnnnnnnnnnnnnnnnnnnnnnnnnnnnnnnnnnnnnnnnnnnnnnnnnnnnnnnnnnnnnnnnnnnnnnnnnnnnnnnnnnnnnnnnnnnnnnnnnnnnnnnnnnnnnnnnnnnnnnnnnnnnnnnnnnnnnnnnnnnnnnnnnnnnnnnnnnnnnnnnnnnnnnnnnnnnnnnnnnnnnnnnnnnnnnnnnnnnnnnnnnnnnnnnnnnnnnnnnnnnnnnnnnnnnnnnnnnnnnnnnnnnnnnnnnnnnnnnnnnnnnnnnnnnnnnnnnnnnnnnnnnnnnnnnnnnnnnnnnnnnnnnnnnnnnnnnnnnnnnnnnnnnnnnnnnnnnnnnnnnnnnnnnnnnnnnnnnnnnnnnnnnnnnnnnnnnnnnnnnnnnnnnnnnnnnnnnnnnnnnnnnnnnnnnnnnnnnnnnnnnnnnnnnnnnnnnnnnnnnnnnnnnnnnnnnnnnnnnnnnnnnnnnnnnnnnnnnnnnnnnnnnnnnnnnnnnnnnnnnnnnnnnnnnnnnnnnnnnnnnnnnnnnnnnnnnnnnnnnnnnnnnnnnnnnnnnnnnnnnnnnnnnnnnnnnnnnnnnnnnnnnnnnnnnnnnnnnnnnnnnnnnnnnnnnnnnnnnnnnnnnnnnnnnnnnnnnnnnnnnnnnnnnnnnnnnnnnnnnnnnnnnnnnnnnnnnnnnnnnnnnnnnnnnnnnnnnnnnnnnnnnnnnnnnnnnnnnnnnnnnnnnnnnnnnnnnnnnnnnnnnnnnnnnnnnnnnnnnnnnnnnnnnnnnnnnnnnnnnnnnnnnnnnnnnnnnnnnnnnnnnnnnnnnnnnnnnnnnnnnnnnnnnnnnnnnnnnnnnnnnnnnnnnnnnnnnnnnnnnnnnnnnnnnnnnnnnnnnnnnnnnnnnnnnnnnnnnnnnnnnnnnnnnnnnnnnnnnnnnnnnnnnnnnnnnnnnnnnnnnnnnnnnnnnnnnnnnnnnnnnnnnnnnnnnnnnnnnnnnnnnnnnnnnnnnnnnnnnnnnnnnnnnnnnnnnnnnnnnnnnnnnnnnnnnnnnnnnnnnnnnnnnnnnnnnnnnnnnnnnnnnnnnnnnnnnnnnnnnnnnnnnnnnnnnnnnnnnnnnnnnnnnnnnnnnnnnnnnnnnnnnnnnnnnnnnnnnnnnnnnnnnnnnnnnnnnnnnnnnnnnnnnnnnnnnnnnnnnnnnnnnnnnnnnnnnnnnnnnnnnnnnnnnnnnnnnnnnnnnnnnnnnnnnnnnnnnnnnnnnnnnnnnnnnnnnnnnnnnnnnnnnnnnnnnnnnnnnnnnnnnnnnnnnnnnnnnnnnnnnnnnnnnnnnnnnnnnnnnnnnnnnnnnnnnnnnnnnnnnnnnnnnnnnnnnnnnnnnnnnnnnnnnnnnnnnnnnnnnnnnnnnnnnnnnnnnnnnnnnnnnnnnnnnnnnnnnnnnnnnnnnnnnnnnnnnnnnnnnnnnnnnnnnnnnnnnnnnnnnnnnnnnnnnnnnnnnnnnnnnnnnnnnnnnnnnnnnnnnnnnnnnnnnnnnnnnnnnnnnnnnnnnnnnnnnnnnnnnnnnnnnnnnnnnnnnnnnnnnnnnnnnnnnnnnnnnnnnnnnnnnnnnnnnnnnnnnnnnnnnnnnnnnnnnnnnnnnnnnnnnnnnnnnnnnnnnnnnnnnnnnnnnnnnnnnnnnnnnnnnnnnnnnnnnnnnnnnnnnnnnnnnnnnnnnnnnnnnnnnnnnnnnnnnnnnnnnnnnnnnnnnnnnnnnnnnnnnnnnnnnnnnnnnnnnnnnnnnnnnnnnnnnnnnnnnnnnnnnnnnnnnnnnnnnnnnnnnnnnnnnnnnnnnnnnnnnnnnnnnnnnnnnnnnnnnnnnnnnnnnnnnnnnnnnnnnnnnnnnnnnnnnnnnnnnnnnnnnnnnnnnnnnnnnnnnnnnnnnnnnnnnnnnnnnnnnnnnnnnnnnnnnnnnnnnnnnnnnnnnnnnnnnnnnnnnnnnnnnnnnnnnnnnnnnnnnnnnnnnnnnnnnnnnnnnnnnnnnnnnnnnnnnnnnnnnnnnnnnnnnnnnnnnnnnnnnnnnnnnnnnnnnnnnnnnnnnnnnnnnnnnnnnnnnnnnnnnnnnnnnnnnnnnnnnnnnnnnnnnnnnnnnnnnnnnnnnnnnnnnnnnnnnnnnnnnnnnnnnnnnnnnnnnnnnnnnnnnnnnnnnnnnnnnnnnnnnnnnnnnnnnnnnnnnnnnnnnnnnnnnnnnnnnnnnnnnnnnnnnnnnnnnnnnnnnnnnnnnnnnnnnnnnnnnnnnnnnnnnnnnnnnnnnnnnnnnnnnnnnnnnnnnnnnnnnnnnnnnnnnnnnnnnnnnnnnnnnnnnnnnnnnnnnnnnnnnnnnnnnnnnnnnnnnnnnnnnnnnnnnnnnnnnnnnnnnnnnnnnnnnnnnnnnnnnnnnnnnnnnnnnnnnnnnnnnnnnnnnnnnnnnnnnnnnnnnnnnnnnnnnnnnnnnnnnnnnnnnnnnnnnnnnnnnnnnnnnnnnnnnnnnnnnnnnnnnnnnnnnnnnnnnnnnnnnnnnnnnnnnnnnnnnnnnnnnnnnnnnnnnnnnnnnnnnnnnnnnnnnnnnnnnnnnnnnnnnnnnnnnnnnnnnnnnnnnnnnnnnnnnnnnnnnnnnnnnnnnnnnnnnnnnnnnnnnnnnnnnnnnnnnnnnnnnnnnnnnnnnnnnnnnnnnnnnnnnnnnnnnnnnnnnnnnnnnnnnnnnnnnnnnnnnnnnnnnnnnnnnnnnnnnnnnnnnnnnnnnnnnnnnnnnnnnnnnnnnnnnnnnnnnnnnnnnnnnnnnnnnnnnnnnnnnnnnnnnnnnnnnnnnnnnnnnnnnnnnnnnnnnnnnnnnnnnnnnnnnnnnnnnnnnnnnnnnnnnnnnnnnnnnnnnnnnnnnnnnnnnnnnnnnnnnnnnnnnnnnnnnnnnnnnnnnnnnnnnnnnnnnnnnnnnnnnnnnnnnnnnnnnnnnnnnnnnnnnnnnnnnnnnnnnnnnnnnnnnnnnnnnnnnnnnnnnnnnnnnnnnnnnnnnnnnnnnnnnnnnnnnnnnnnnnnnnnnnnnnnnnnnnnnnnnnnnnnnnnnnnnnnnnnnnnnnnnnnnnnnnnnnnnnnnnnnnnnnnnnnnnnnnnnnnnnnnnnnnnnnnnnnnnnnnnnnnnnnnnnnnnnnnnnnnnnnnnnnnnnnnnnnnnnnnnnnnnnnnnnnnnnnnnnnnnnnnnnnnnnnnnnnnnnnnnnnnnnnnnnnnnnnnnnnnnnnnnnnnnnnnnnnnnnnnnnnnnnnnnnnnnnnnnnnnnnnnnnnnnnnnnnnnnnnnnnnnnnnnnnnnnnnnnnnnnnnnnnnnnnnnnnnnnnnnnnnnnnnnnnnnnnnnnnnnnnnnnnnnnnnnnnnnnnnnnnnnnnnnnnnnnnnnnnnnnnnnnnnnnnnnnnnnnnnnnnnnnnnnnnnnnnnnnnnnnnnnnnnnnnnnnnnnnnnnnnnnnnnnnnnnnnnnnnnnnnnnnnnnnnnnnnnnnnnnnnnnnnnnnnnnnnnnnnnnnnnnnnnnnnnnnnnnnnnnnnnnnnnnnnnnnnnnnnnnnnnnnnnnnnnnnnnnnnnnnnnnnnnnnnnnnnnnnnnnnnnnnnnnnnnnnnnnnnnnnnnnnnnnnnnnnnnnnnnnnnnnnnnnnnnnnnnnnnnnnnnnnnnnnnnnnnnnnnnnnnnnnnnnnnnnnnnnnnnnnnnnnnnnnnnnnnnnnnnnnnnnnnnnnnnnnnnnnnnnnnnnnnnnnnnnnnnnnnnnnnnnnnnnnnnnnnnnnnnnnnnnnnnnnnnnnnnnnnnnnnnnnnnnnnnnnnnnnnnnnnnnnnnnnnnnnnnnnnnnnnnnnnnnnnnnnnnnnnnnnnnnnnnnnnnnnnnnnnnnnnnnnnnnnnnnnnnnnnnnnnnnnnnnnnnnnnnnnnnnnnnnnnnnnnnnnnnnnnnnnnnnnnnnnnnnnnnnnnnnnnnnnnnnnnnnnnnnnnnnnnnnnnnnnnnnnnnnnnnnnnnnnnnnnnnnnnnnnnnnnnnnnnnnnnnnnnnnnnnnnnnnnnnnnnnnnnnnnnnnnnnnnnnnnnnnnnnnnnnnnnnnnnnnnnnnnnnnnnnnnnnnnnnnnnnnnnnnnnnnnnnnnnnnnnnnnnnnnnnnnnnnnnnnnnnnnnnnnnnnnnnnnnnnnnnnnnnnnnnnnnnnnnnnnnnnnnnnnnnnnnnnnnnnnnnnnnnnnnnnnnnnnnnnnnnnnnnnnnnnnnnnnnnnnnnnnnnnnnnnnnnnnnnnnnnnnnnnnnnnnnnnnnnnnnnnnnnnnnnnnnnnnnnnnnnnnnnnnnnnnnnnnnnnnnnnnnnnnnnnnnnnnnnnnnnnnnnnnnnnnnnnnnnnnnnnnnnnnnnnnnnnnnnnnnnnnnnnnnnnnnnnnnnnnnnnnnnnnnnnnnnnnnnnnnnnnnnnnnnnnnnnnnnnnnnnnnnnnnnnnnnnnnnnnnnnnnnnnnnnnnnnnnnnnnnnnnnnnnnnnnnnnnnnnnnnnnnnnnnnnnnnnnnnnnnnnnnnnnnnnnnnnnnnnnnnnnnnnnnnnnnnnnnnnnnnnnnnnnnnnnnnnnnnnnnnnnnnnnnnnnnnnnnnnnnnnnnnnnnnnnnnnnnnnnnnnnnnnnnnnnnnnnnnnnnnnnnnnnnnnnnnnnnnnnnnnnnnnnnnnnnnnnnnnnnnnnnnnnnnnnnnnnnnnnnnnnnnnnnnnnnnnnnnnnnnnnnnnnnnnnnnnnnnnnnnnnnnnnnnnnnnnnnnnnnnnnnnnnnnnnnnnnnnnnnnnnnnnnnnnnnnnnnnnnnnnnnnnnnnnnnnnnnnnnnnnnnnnnnnnnnnnnnnnnnnnnnnnnnnnnnnnnnnnnnnnnnnnnnnnnnnnnnnnnnnnnnnnnnnnnnnnnnnnnnnnnnnnnnnnnnnnnnnnnnnnnnnnnnnnnnnnnnnnnnnnnnnnnnnnnnnnnnnnnnnnnnnnnnnnnnnnnnnnnnnnnnnnnnnnnnnnnnnnnnnnnnnnnnnnnnnnnnnnnnnnnnnnnnnnnnnnnnnnnnnnnnnnnnnnnnnnnnnnnnnnnnnnnnnnnnnnnnnnnnnnnnnnnnnnnnnnnnnnnnnnnnnnnnnnnnnnnnnnnnnnnnnnnnnnnnnnnnnnnnnnnnnnnnnnnnnnnnnnnnnnnnnnnnnnnnnnnnnnnnnnnnnnnnnnnnnnnnnnnnnnnnnnnnnnnnnnnnnnnnnnnnnnnnnnnnnnnnnnnnnnnnnnnnnnnnnnnnnnnnnnnnnnnnnnnnnnnnnnnnnnnnnnnnnnnnnnnnnnnnnnnnnnnnnnnnnnnnnnnnnnnnnnnnnnnnnnnnnnnnnnnnnnnnnnnnnnnnnnnnnnnnnnnnnnnnnnnnnnnnnnnnnnnnnnnnnnnnnnnnnnnnnnnnnnnnnnnnnnnnnnnnnnnnnnnnnnnnnnnnnnnnnnnnnnnnnnnnnnnnnnnnnnnnnnnnnnnnnnnnnnnnnnnnnnnnnnnnnnnnnnnnnnnnnnnnnnnnnnnnnnnnnnnnnnnnnnnnnnnnnnnnnnnnnnnnnnnnnnnnnnnnnnnnnnnnnnnnnnnnnnnnnnnnnnnnnnnnnnnnnnnnnnnnnnnnnnnnnnnnnnnnnnnnnnnnnnnnnnnnnnnnnnnnnnnnnnnnnnnnnnnnnnnnnnnnnnnnnnnnnnnnnnnnnnnnnnnnnnnnnnnnnnnnnnnnnnnnnnnnnnnnnnnnnnnnnnnnnnnnnnnnnnnnnnnnnnnnnnnnnnnnnnnnnnnnnnnnnnnnnnnnnnnnnnnnnnnnnnnnnnnnnnnnnnnnnnnnnnnnnnnnnnnnnnnnnnnnnnnnnnnnnnnnnnnnnnnnnnnnnnnnnnnnnnnnnnnnnnnnnnnnnnnnnnnnnnnnnnnnnnnnnnnnnnnnnnnnnnnnnnnnnnnnnnnnnnnnnnnnnnnnnnnnnnnnnnnnnnnnnnnnnnnnnnnnnnnnnnnnnnnnnnnnnnnnnnnnnnnnnnnnnnnnnnnnnnnnnnnnnnnnnnnnnnnnnnnnnnnnnnnnnnnnnnnnnnnnnnnnnnnnnnnnnnnnnnnnnnnnnnnnnnnnnnnnnnnnnnnnnnnnnnnnnnnnnnnnnnnnnnnnnnnnnnnnnnnnnnnnnnnnnnnnnnnnnnnnnnnnnnnnnnnnnnnnnnnnnnnnnnnnnnnnnnnnnnnnnnnnnnnnnnnnnnnnnnnnnnnnnnnnnnnnnnnnnnnnnnnnnnnnnnnnnnnnnnnnnnnnnnnnnnnnnnnnnnnnnnnnnnnnnnnnnnnnnnnnnnnnnnnnnnnnnnnnnnnnnnnnnnnnnnnnnnnnnnnnnnnnnnnnnnnnnnnnnnnnnnnnnnnnnnnnnnnnnnnnnnnnnnnnnnnnnnnnnnnnnnnnnnnnnnnnnnnnnnnnnnnnnnnnnnnnnnnnnnnnnnnnnnnnnnnnnnnnnnnnnnnnnnnnnnnnnnnnnnnnnnnnnnnnnnnnnnnnnnnnnnnnnnnnnnnnnnnnnnnnnnnnnnnnnnnnnnnnnnnnnnnnnnnnnnnnnnnnnnnnnnnnnnnnnnnnnnnnnnnnnnnnnnnnnnnnnnnnnnnnnnnnnnnnnnnnnnnnnnnnnnnnnnnnnnnnnnnnnnnnnnnnnnnnnnnnnnnnnnnnnnnnnnnnnnnnnnnnnnnnnnnnnnnnnnnnnnnnnnnnnnnnnnnnnnnnnnnnnnnnnnnnnnnnnnnnnnnnnnnnnnnnnnnnnnnnnnnnnnnnnnnnnnnnnnnnnnnnnnnnnnnnnnnnnnnnnnnnnnnnnnnnnnnnnnnnnnnnnnnnnnnnnnnnnnnnnnnnnnnnnnnnnnnnnnnnnnnnnnnnnnnnnnnnnnnnnnnnnnnnnnnnnnnnnnnnnnnnnnnnnnnnnnnnnnnnnnnnnnnnnnnnnnnnnnnnnnnnnnnnnnnnnnnnnnnnnnnnnnnnnnnnnnnnnnnnnnnnnnnnnnnnnnnnnnnnnnnnnnnnnnnnnnnnnnnnnnnnnnnnnnnnnnnnnnnnnnnnnnnnnnnnnnnnnnnnnnnnnnnnnnnnnnnnnnnnnnnnnnnnnnnnnnnnnnnnnnnnnnnnnnnnnnnnnnnnnnnnnnnnnnnnnnnnnnnnnnnnnnnnnnnnnnnnnnnnnnnnnnnnnnnnnnnnnnnnnnnnnnnnnnnnnnnnnnnnnnnnnnnnnnnnnnnnnnnnnnnnnnnnnnnnnnnnnnnnnnnnnnnnnnnnnnnnnnnnnnnnnnnnnnnnnnnnnnnnnnnnnnnnnnnnnnnnnnnnnnnnnnnnnnnnnnnnnnnnnnnnnnnnnnnnnnnnnnnnnnnnnnnnnnnnnnnnnnnnnnnnnnnnnnnnnnnnnnnnnnnnnnnnnnnnnnnnnnnnnnnnnnnnnnnnnnnnnnnnnnnnnnnnnnnnnnnnnnnnnnnnnnnnnnnnnnnnnnnnnnnnnnnnnnnnnnnnnnnnnnnnnnnnnnnnnnnnnnnnnnnnnnnnnnnnnnnnnnnnnnnnnnnnnnnnnnnnnnnnnnnnnnnnnnnnnnnnnnnnnnnnnnnnnnnnnnnnnnnnnnnnnnnnnnnnnnnnnnnnnnnnnnnnnnnnnnnnnnnnnnnnnnnnnnnnnnnnnnnnnnnnnnnnnnnnnnnnnnnnnnnnnnnnnnnnnnnnnnnnnnnnnnnnnnnnnnnnnnnnnnnnnnnnnnnnnnnnnnnnnnnnnnnnnnnnnnnnnnnnnnnnnnnnnnnnnnnnnnnnnnnnnnnnnnnnnnnnnnnnnnnnnnnnnnnnnnnnnnnnnnnnnnnnnnnnnnnnnnnnnnnnnnnnnnnnnnnnnnnnnnnnnnnnnnnnnnnnnnnnnnnnnnnnnnnnnnnnnnnnnnnnnnnnnnnnnnnnnnnnnnnnnnnnnnnnnnnnnnnnnnnnnnnnnnnnnnnnnnnnnnnnnnnnnnnnnnnnnnnnnnnnnnnnnnnnnnnnnnnnnnnnnnnnnnnnnnnnnnnnnnnnnnnnnnnnnnnnnnnnnnnnnnnnnnnnnnnnnnnnnnnnnnnnnnnnnnnnnnnnnnnnnnnnnnnnnnnnnnnnnnnnnnnnnnnnnnnnnnnnnnnnnnnnnnnnnnnnnnnnnnnnnnnnnnnnnnnnnnnnnnnnnnnnnnnnnnnnnnnnnnnnnnnnnnnnnnnnnnnnnnnnnnnnnnnnnnnnnnnnnnnnnnnnnnnnnnnnnnnnnnnnnnnnnnnnnnnnnnnnnnnnnnnnnnnnnnnnnnnnnnnnnnnnnnnnnnnnnnnnnnnnnnnnnnnnnnnnnnnnnnnnnnnnnnnnnnnnnnnnnnnnnnnnnnnnnnnnnnnnnnnnnnnnnnnnnnnnnnnnnnnnnnnnnnnnnnnnnnnnnnnnnnnnnnnnnnnnnnnnnnnnnnnnnnnnnnnnnnnnnnnnnnnnnnnnnnnnnnnnnnnnnnnnnnnnnnnnnnnnnnnnnnnnnnnnnnnnnnnnnnnnnnnnnnnnnnnnnnnnnnnnnnnnnnnnnnnnnnnnnnnnnnnnnnnnnnnnnnnnnnnnnnnnnnnnnnnnnnnnnnnnnnnnnnnnnnnnnnnnnnnnnnnnnnnnnnnnnnnnnnnnnnnnnnnnnnnnnnnnnnnnnnnnnnnnnnnnnnnnnnnnnnnnnnnnnnnnnnnnnnnnnnnnnnnnnnnnnnnnnnnnnnnnnnnnnnnnnnnnnnnnnnnnnnnnnnnnnnnnnnnnnnnnnnnnnnnnnnnnnnnnnnnnnnnnnnnnnnnnnnnnnnnnnnnnnnnnnnnnnnnnnnnnnnnnnnnnnnnnnnnnnnnnnnnnnnnnnnnnnnnnnnnnnnnnnnnnnnnnnnnnnnnnnnnnnnnnnnnnnnnnnnnnnnnnnnnnnnnnnnnnnnnnnnnnnnnnnnnnnnnnnnnnnnnnnnnnnnnnnnnnnnnnnnnnnnnnnnnnnnnnnnnnnnnnnnnnnnnnnnnnnnnnnnnnnnnnnnnnnnnnnnnnnnnnnnnnnnnnnnnnnnnnnnnnnnnnnnnnnnnnnnnnnnnnnnnnnnnnnnnnnnnnnnnnnnnnnnnnnnnnnnnnnnnnnnnnnnnnnnnnnnnnnnnnnnnnnnnnnnnnnnnnnnnnnnnnnnnnnnnnnnnnnnnnnnnnnnnnnnnnnnnnnnnnnnnnnnnnnnnnnnnnnnnnnnnnnnnnnnnnnnnnnnnnnnnnnnnnnnnnnnnnnnnnnnnnnnnnnnnnnnnnnnnnnnnnnnnnnnnnnnnnnnnnnnnnnnnnnnnnnnnnnnnnnnnnnnnnnnnnnnnnnnnnnnnnnnnnnnnnnnnnnnnnnnnnnnnnnnnnnnnnnnnnnnnnnnnnnnnnnnnnnnnnnnnnnnnnnnnnnnnnnnnnnnnnnnnnnnnnnnnnnnnnnnnnnnnnnnnnnnnnnnnnnnnnnnnnnnnnnnnnnnnnnnnnnnnnnnnnnnnnnnnnnnnnnnnnnnnnnnnnnnnnnnnnnnnnnnnnnnnnnnnnnnnnnnnnnnnnnnnnnnnnnnnnnnnnnnnnnnnnnnnnnnnnnnnnnnnnnnnnnnnnnnnnnnnnnnnnnnnnnnnnnnnnnnnnnnnnnnnnnnnnnnnnnnnnnnnnnnnnnnnnnnnnnnnnnnnnnnnnnnnnnnnnnnnnnnnnnnnnnnnnnnnnnnnnnnnnnnnnnnnnnnnnnnnnnnnnnnnnnnnnnnnnnnnnnnnnnnnnnnnnnnnnnnnnnnnnnnnnnnnnnnnnnnnnnnnnnnnnnnnnnnnnnnnnnnnnnnnnnnnnnnnnnnnnnnnnnnnnnnnnnnnnnnnnnnnnnnnnnnnnnnnnnnnnnnnnnnnnnnnnnnnnnnnnnnnnnnnnnnnnnnnnnnnnnnnnnnnnnnnnnnnnnnnnnnnnnnnnnnnnnnnnnnnnnnnnnnnnnnnnnnnnnnnnnnnnnnnnnnnnnnnnnnnnnnnnnnnnnnnnnnnnnnnnnnnnnnnnnnnnnnnnnnnnnnnnnnnnnnnnnnnnnnnnnnnnnnnnnnnnnnnnnnnnnnnnnnnnnnnnnnnnnnnnnnnnnnnnnnnnnnnnnnnnnnnnnnnnnnnnnnnnnnnnnnnnnnnnnnnnnnnnnnnnnnnnnnnnnnnnnnnnnnnnnnnnnnnnnnnnnnnnnnnnnnnnnnnnnnnnnnnnnnnnnnnnnnnnnnnnnnnnnnnnnnnnnnnnnnnnnnnnnnnnnnnnnnnnnnnnnnnnnnnnnnnnnnnnnnnnnnnnnnnnnnnnnnnnnnnnnnnnnnnnnnnnnnnnnnnnnnnnnnnnnnnnnnnnnnnnnnnnnnnnnnnnnnnnnnnnnnnnnnnnnnnnnnnnnnnnnnnnnnnnnnnnnnnnnnnnnnnnnnnnnnnnnnnnnnnnnnnnnnnnnnnnnnnnnnnnnnnnnnnnnnnnnnnnnnnnnnnnnnnnnnnnnnnnnnnnnnnnnnnnnnnnnnnnnnnnnnnnnnnnnnnnnnnnnnnnnnnnnnnnnnnnnnnnnnnnnnnnnnnnnnnnnnnnnnnnnnnnnnnnnnnnnnnnnnnnnnnnnnnnnnnnnnnnnnnnnnnnnnnnnnnnnnnnnnnnnnnnnnnnnnnnnnnnnnnnnnnnnnnnnnnnnnnnnnnnnnnnnnnnnnnnnnnnnnnnnnnnnnnnnnnnnnnnnnnnnnnnnnnnnnnnnnnnnnnnnnnnnnnnnnnnnnnnnnnnnnnnnnnnnnnnnnnnnnnnnnnnnnnnnnnnnnnnnnnnnnnnnnnnnnnnnnnnnnnnnnnnnnnnnnnnnnnnnnnnnnnnnnnnnnnnnnnnnnnnnnnnnnnnnnnnnnnnnnnnnnnnnnnnnnnnnnnnnnnnnnnnnnnnnnnnnnnnnnnnnnnnnnnnnnnnnnnnnnnnnnnnnnnnnnnnnnnnnnnnnnnnnnnnnnnnnnnnnnnnnnnnnnnnnnnnnnnnnnnnnnnnnnnnnnnnnnnnnnnnnnnnnnnnnnnnnnnnnnnnnnnnnnnnnnnnnnnnnnnnnnnnnnnnnnnnnnnnnnnnnnnnnnnnnnnnnnnnnnnnnnnnnnnnnnnnnnnnnnnnnnnnnnnnnnnnnnnnnnnnnnnnnnnnnnnnnnnnnnnnnnnnnnnnnnnnnnnnnnnnnnnnnnnnnnnnnnnnnnnnnnnnnnnnnnnnnnnnnnnnnnnnnnnnnnnnnnnnnnnnnnnnnnnnnnnnnnnnnnnnnnnnnnnnnnnnnnnnnnnnnnnnnnnnnnnnnnnnnnnnnnnnnnnnnnnnnnnnnnnnnnnnnnnnnnnnnnnnnnnnnnnnnnnnnnnnnnnnnnnnnnnnnnnnnnnnnnnnnnnnnnnnnnnnnnnnnnnnnnnnnnnnnnnnnnnnnnnnnnnnnnnnnnnnnnnnnnnnnnnnnnnnnnnnnnnnnnnnnnnnnnnnnnnnnnnnnnnnnnnnnnnnnnnnnnnnnnnnnnnnnnnnnnnnnnnnnnnnnnnnnnnnnnnnnnnnnnnnnnnnnnnnnnnnnnnnnnnnnnnnnnnnnnnnnnnnnnnnnnnnnnnnnnnnnnnnnnnnnnnnnnnnnnnnnnnnnnnnnnnnnnnnnnnnnnnnnnnnnnnnnnnnnnnnnnnnnnnnnnnnnnnnnnnnnnnnnnnnnnnnnnnnnnnnnnnnnnnnnnnnnnnnnnnnnnnnnnnnnnnnnnnnnnnnnnnnnnnnnnnnnnnnnnnnnnnnnnnnnnnnnnnnnnnnnnnnnnnnnnnnnnnnnnnnnnnnnnnnnnnnnnnnnnnnnnnnnnnnnnnnnnnnnnnnnnnnnnnnnnnnnnnnnnnnnnnnnnnnnnnnnnnnnnnnnnnnnnnnnnnnnnnnnnnnnnnnnnnnnnnnnnnnnnnnnnnnnnnnnnnnnnnnnnnnnnnnnnnnnnnnnnnnnnnnnnnnnnnnnnnnnnnnnnnnnnnnnnnnnnnnnnnnnnnnnnnnnnnnnnnnnnnnnnnnnnnnnnnnnnnnnnnnnnnnnnnnnnnnnnnnnnnnnnnnnnnnnnnnnnnnnnnnnnnnnnnnnnnnnnnnnnnnnnnnnnnnnnnnnnnnnnnnnnnnnnnnnnnnnnnnnnnnnnnnnnnnnnnnnnnnnnnnnnnnnnnnnnnnnnnnnnnnnnnnnnnnnnnnnnnnnnnnnnnnnnnnnnnnnnnnnnnnnnnnnnnnnnnnnnnnnnnnnnnnnnnnnnnnnnnnnnnnnnnnnnnnnnnnnnnnnnnnnnnnnnnnnnnnnnnnnnnnnnnnnnnnnnnnnnnnnnnnnnnnnnnnnnnnnnnnnnnnnnnnnnnnnnnnnnnnnnnnnnnnnnnnnnnnnnnnnnnnnnnnnnnnnnnnnnnnnnnnnnnnnnnnnnnnnnnnnnnnnnnnnnnnnnnnnnnnnnnnnnnnnnnnnnnnnnnnnnnnnnnnnnnnnnnnnnnnnnnnnnnnnnnnnnnnnnnnnnnnnnnnnnnnnnnnnnnnnnnnnnnnnnnnnnnnnnnnnnnnnnnnnnnnnnnnnnnnnnnnnnnnnnnnnnnnnnnnnnnnnnnnnnnnnnnnnnnnnnnnnnnnnnnnnnnnnnnnnnnnnnnnnnnnnnnnnnnnnnnnnnnnnnnnnnnnnnnnnnnnnnnnnnnnnnnnnnnnnnnnnnnnnnnnnnnnnnnnnnnnnnnnnnnnnnnnnnnnnnnnnnnnnnnnnnnnnnnnnnnnnnnnnnnnnnnnnnnnnnnnnnnnnnnnnnnnnnnnnnnnnnnnnnnnnnnnnnnnnnnnnnnnnnnnnnnnnnnnnnnnnnnnnnnnnnnnnnnnnnnnnnnnnnnnnnnnnnnnnnnnnnnnnnnnnnnnnnnnnnnnnnnnnnnnnnnnnnnnnnnnnnnnnnnnnnnnnnnnnnnnnnnnnnnnnnnnnnnnnnnnnnnnnnnnnnnnnnnnnnnnnnnnnnnnnnnnnnnnnnnnnnnnnnnnnnnnnnnnnnnnnnnnnnnnnnnnnnnnnnnnnnnnnnnnnnnnnnnnnnnnnnnnnnnnnnnnnnnnnnnnnnnnnnnnnnnnnnnnnnnnnnnnnnnnnnnnnnnnnnnnnnnnnnnnnnnnnnnnnnnnnnnnnnnnnnnnnnnnnnnnnnnnnnnnnnnnnnnnnnnnnnnnnnnnnnnnnnnnnnnnnnnnnnnnnnnnnnnnnnnnnnnnnnnnnnnnnnnnnnnnnnnnnnnnnnnnnnnnnnnnnnnnnnnnnnnnnnnnnnnnnnnnnnnnnnnnnnnnnnnnnnnnnnnnnnnnnnnnnnnnnnnnnnnnnnnnnnnnnnnnnnnnnnnnnnnnnnnnnnnnnnnnnnnnnnnnnnnnnnnnnnnnnnnnnnnnnnnnnnnnnnnnnnnnnnnnnnnnnnnnnnnnnnnnnnnnnnnnnnnnnnnnnnnnnnnnnnnnnnnnnnnnnnnnnnnnnnnnnnnnnnnnnnnnnnnnnnnnnnnnnnnnnnnnnnnnnnnnnnnnnnnnnnnnnnnnnnnnnnnnnnnnnnnnnnnnnnnnnnnnnnnnnnnnnnnnnnnnnnnnnnnnnnnnnnnnnnnnnnnnnnnnnnnnnnnnnnnnnnnnnnnnnnnnnnnnnnnnnnnnnnnnnnnnnnnnnnnnnnnnnnnnnnnnnnnnnnnnnnnnnnnnnnnnnnnnnnnnnnnnnnnnnnnnnnnnnnnnnnnnnnnnnnnnnnnnnnnnnnnnnnnnnnnnnnnnnnnnnnnnnnnnnnnnnnnnnnnnnnnnnnnnnnnnnnnnnnnnnnnnnnnnnnnnnnnnnnnnnnnnnnnnnnnnnnnnnnnnnnnnnnnnnnnnnnnnnnnnnnnnnnnnnnnnnnnnnnnnnnnnnnnnnnnnnnnnnnnnnnnnnnnnnnnnnnnnnnnnnnnnnnnnnnnnnnnnnnnnnnnnnnnnnnnnnnnnnnnnnnnnnnnnnnnnnnnnnnnnnnnnnnnnnnnnnnnnnnnnnnnnnnnnnnnnnnnnnnnnnnnnnnnnnnnnnnnnnnnnnnnnnnnnnnnnnnnnnnnnnnnnnnnnnnnnnnnnnnnnnnnnnnnnnnnnnnnnnnnnnnnnnnnnnnnnnnnnnnnnnnnnnnnnnnnnnnnnnnnnnnnnnnnnnnnnnnnnnnnnnnnnnnnnnnnnnnnnnnnnnnnnnnnnnnnnnnnnnnnnnnnnnnnnnnnnnnnnnnnnnnnnnnnnnnnnnnnnnnnnnnnnnnnnnnnnnnnnnnnnnnnnnnnnnnnnnnnnnnnnnnnnnnnnnnnnnnnnnnnnnnnnnnnnnnnnnnnnnnnnnnnnnnnnnnnnnnnnnnnnnnnnnnnnnnnnnnnnnnnnnnnnnnnnnnnnnnnnnnnnnnnnnnnnnnnnnnnnnnnnnnnnnnnnnnnnnnnnnnnnnnnnnnnnnnnnnnnnnnnnnnnnnnnnnnnnnnnnnnnnnnnnnnnnnnnnnnnnnnnnnnnnnnnnnnnnnnnnnnnnnnnnnnnnnnnnnnnnnnnnnnnnnnnnnnnnnnnnnnnnnnnnnnnnnnnnnnnnnnnnnnnnnnnnnnnnnnnnnnnnnnnnnnnnnnnnnnnnnnnnnnnnnnnnnnnnnnnnnnnnnnnnnnnnnnnnnnnnnnnnnnnnnnnnnnnnnnnnnnnnnnnnnnnnnnnnnnnnnnnnnnnnnnnnnnnnnnnnnnnnnnnnnnnnnnnnnnnnnnnnnnnnnnnnnnnnnnnnnnnnnnnnnnnnnnnnnnnnnnnnnnnnnnnnnnnnnnnnnnnnnnnnnnnnnnnnnnnnnnnnnnnnnnnnnnnnnnnnnnnnnnnnnnnnnnnnnnnnnnnnnnnnnnnnnnnnnnnnnnnnnnnnnnnnnnnnnnnnnnnnnnnnnnnnnnnnnnnnnnnnnnnnnnnnnnnnnnnnnnnnnnnnnnnnnnnnnnnnnnnnnnnnnnnnnnnnnnnnnnnnnnnnnnnnnnnnnnnnnnnnnnnnnnnnnnnnnnnnnnnnnnnnnnnnnnnnnnnnnnnnnnnnnnnnnnnnnnnnnnnnnnnnnnnnnnnnnnnnnnnnnnnnnnnnnnnnnnnnnnnnnnnnnnnnnnnnnnnnnnnnnnnnnnnnnnnnnnnnnnnnnnnnnnnnnnnnnnnnnnnnnnnnnnnnnnnnnnnnnnnnnnnnnnnnnnnnnnnnnnnnnnnnnnnnnnnnnnnnnnnnnnnnnnnnnnnnnnnnnnnnnnnnnnnnnnnnnnnnnnnnnnnnnnnnnnnnnnnnnnnnnnnnnnnnnnnnnnnnnnnnnnnnnnnnnnnnnnnnnnnnnnnnnnnnnnnnnnnnnnnnnnnnnnnnnnnnnnnnnnnnnnnnnnnnnnnnnnnnnnnnnnnnnnnnnnnnnnnnnnnnnnnnnnnnnnnnnnnnnnnnnnnnnnnnnnnnnnnnnnnnnnnnnnnnnnnnnnnnnnnnnnnnnnnnnnnnnnnnnnnnnnnnnnnnnnnnnnnnnnnnnnnnnnnnnnnnnnnnnnnnnnnnnnnnnnnnnnnnnnnnnnnnnnnnnnnnnnnnnnnnnnnnnnnnnnnnnnnnnnnnnnnnnnnnnnnnnnnnnnnnnnnnnnnnnnnnnnnnnnnnnnnnnnnnnnnnnnnnnnnnnnnnnnnnnnnnnnnnnnnnnnnnnnnnnnnnnnnnnnnnnnnnnnnnnnnnnnnnnnnnnnnnnnnnnnnnnnnnnnnnnnnnnnnnnnnnnnnnnnnnnnnnnnnnnnnnnnnnnnnnnnnnnnnnnnnnnnnnnnnnnnnnnnnnnnnnnnnnnnnnnnnnnnnnnnnnnnnnnnnnnnnnnnnnnnnnnnnnnnnnnnnnnnnnnnnnnnnnnnnnnnnnnnnnnnnnnnnnnnnnnnnnnnnnnnnnnnnnnnnnnnnnnnnnnnnnnnnnnnnnnnnnnnnnnnnnnnnnnnnnnnnnnnnnnnnnnnnnnnnnnnnnnnnnnnnnnnnnnnnnnnnnnnnnnnnnnnnnnnnnnnnnnnnnnnnnnnnnnnnnnnnnnnnnnnnnnnnnnnnnnnnnnnnnnnnnnnnnnnnnnnnnnnnnnnnnnnnnnnnnnnnnnnnnnnnnnnnnnnnnnnnnnnnnnnnnnnnnnnnnnnnnnnnnnnnnnnnnnnnnnnnnnnnnnnnnnnnnnnnnnnnnnnnnnnnnnnnnnnnnnnnnnnnnnnnnnnnnnnnnnnnnnnnnnnnnnnnnnnnnnnnnnnnnnnnnnnnnnnnnnnnnnnnnnnnnnnnnnnnnnnnnnnnnnnnnnnnnnnnnnnnnnnnnnnnnnnnnnnnnnnnnnnnnnnnnnnnnnnnnnnnnnnnnnnnnnnnnnnnnnnnnnnnnnnnnnnnnnnnnnnnnnnnnnnnnnnnnnnnnnnnnnnnnnnnnnnnnnnnnnnnnnnnnnnnnnnnnnnnnnnnnnnnnnnnnnnnnnnnnnnnnnnnnnnnnnnnnnnnnnnnnnnnnnnnnnnnnnnnnnnnnnnnnnnnnnnnnnnnnnnnnnnnnnnnnnnnnnnnnnnnnnnnnnnnnnnnnnnnnnnnnnnnnnnnnnnnnnnnnnnnnnnnnnnnnnnnnnnnnnnnnnnnnnnnnnnnnnnnnnnnnnnnnnnnnnnnnnnnnnnnnnnnnnnnnnnnnnnnnnnnnnnnnnnnnnnnnnnnnnnnnnnnnnnnnnnnnnnnnnnnnnnnnnnnnnnnnnnnnnnnnnnnnnnnnnnnnnnnnnnnnnnnnnnnnnnnnnnnnnnnnnnnnnnnnnnnnnnnnnnnnnnnnnnnnnnnnnnnnnnnnnnnnnnnnnnnnnnnnnnnnnnnnnnnnnnnnnnnnnnnnnnnnnnnnnnnnnnnnnnnnnnnnnnnnnnnnnnnnnnnnnnnnnnnnnnnnnnnnnnnnnnnnnnnnnnnnnnnnnnnnnnnnnnnnnnnnnnnnnnnnnnnnnnnnnnnnnnnnnnnnnnnnnnnnnnnnnnnnnnnnnnnnnnnnnnnnnnnnnnnnnnnnnnnnnnnnnnnnnnnnnnnnnnnnnnnnnnnnnnnnnnnnnnnnnnnnnnnnnnnnnnnnnnnnnnnnnnnnnnnnnnnnnnnnnnnnnnnnnnnnnnnnnnnnnnnnnnnnnnnnnnnnnnnnnnnnnnnnnnnnnnnnnnnnnnnnnnnnnnnnnnnnnnnnnnnnnnnnnnnnnnnnnnnnnnnnnnnnnnnnnnnnnnnnnnnnnnnnnnnnnnnnnnnnnnnnnnnnnnnnnnnnnnnnnnnnnnnnnnnnnnnnnnnnnnnnnnnnnnnnnnnnnnnnnnnnnnnnnnnnnnnnnnnnnnnnnnnnnnnnnnnnnnnnnnnnnnnnnnnnnnnnnnnnnnnnnnnnnnnnnnnnnnnnnnnnnnnnnnnnnnnnnnnnnnnnnnnnnnnnnnnnnnnnnnnnnnnnnnnnnnnnnnnnnnnnnnnnnnnnnnnnnnnnnnnnnnnnnnnnnnnnnnnnnnnnnnnnnnnnnnnnnnnnnnnnnnnnnnnnnnnnnnnnnnnnnnnnnnnnnnnnnnnnnnnnnnnnnnnnnnnnnnnnnnnnnnnnnnnnnnnnnnnnnnnnnnnnnnnnnnnnnnnnnnnnnnnnnnnnnnnnnnnnnnnnnnnnnnnnnnnnnnnnnnnnnnnnnnnnnnnnnnnnnnnnnnnnnnnnnnnnnnnnnnnnnnnnnnnnnnnnnnnnnnnnnnnnnnnnnnnnnnnnnnnnnnnnnnnnnnnnnnnnnnnnnnnnnnnnnnnnnnnnnnnnnnnnnnnnnnnnnnnnnnnnnnnnnnnnnnnnnnnnnnnnnnnnnnnnnnnnnnnnnnnnnnnnnnnnnnnnnnnnnnnnnnnnnnnnnnnnnnnnnnnnnnnnnnnnnnnnnnnnnnnnnnnnnnnnnnnnnnnnnnnnnnnnnnnnnnnnnnnnnnnnnnnnnnnnnnnnnnnnnnnnnnnnnnnnnnnnnnnnnnnnnnnnnnnnnnnnnnnnnnnnnnnnnnnnnnnnnnnnnnnnnnnnnnnnnnnnnnnnnnnnnnnnnnnnnnnnnnnnnnnnnnnnnnnnnnnnnnnnnnnnnnnnnnnnnnnnnnnnnnnnnnnnnnnnnnnnnnnnnnnnnnnnnnnnnnnnnnnnnnnnnnnnnnnnnnnnnnnnnnnnnnnnnnnnnnnnnnnnnnnnnnnnnnnnnnnnnnnnnnnnnnnnnnnnnnnnnnnnnnnnnnnnnnnnnnnnnnnnnnnnnnnnnnnnnnnnnnnnnnnnnnnnnnnnnnnnnnnnnnnnnnnnnnnnnnnnnnnnnnnnnnnnnnnnnnnnnnnnnnnnnnnnnnnnnnnnnnnnnnnnnnnnnnnnnnnnnnnnnnnnnnnnnnnnnnnnnnnnnnnnnnnnnnnnnnnnnnnnnnnnnnnnnnnnnnnnnnnnnnnnnnnnnnnnnnnnnnnnnnnnnnnnnnnnnnnnnnnnnnnnnnnnnnnnnnnnnnnnnnnnnnnnnnnnnnnnnnnnnnnnnnnnnnnnnnnnnnnnnnnnnnnnnnnnnnnnnnnnnnnnnnnnnnnnnnnnnnnnnnnnnnnnnnnnnnnnnnnnnnnnnnnnnnnnnnnnnnnnnnnnnnnnnnnnnnnnnnnnnnnnnnnnnnnnnnnnnnnnnnnnnnnnnnnnnnnnnnnnnnnnnnnnnnnnnnnnnnnnnnnnnnnnnnnnnnnnnnnnnnnnnnnnnnnnnnnnnnnnnnnnnnnnnnnnnnnnnnnnnnnnnnnnnnnnnnnnnnnnnnnnnnnnnnnnnnnnnnnnnnnnnnnnnnnnnnnnnnnnnnnnnnnnnnnnnnnnnnnnnnnnnnnnnnnnnnnnnnnnnnnnnnnnnnnnnnnnnnnnnnnnnnnnnnnnnnnnnnnnnnnnnnnnnnnnnnnnnnnnnnnnnnnnnnnnnnnnnnnnnnnnnnnnnnnnnnnnnnnnnnnnnnnnnnnnnnnnnnnnnnnnnnnnnnnnnnnnnnnnnnnnnnnnnnnnnnnnnnnnnnnnnnnnnnnnnnnnnnnnnnnnnnnnnnnnnnnnnnnnnnnnnnnnnnnnnnnnnnnnnnnnnnnnnnnnnnnnnnnnnnnnnnnnnnnnnnnnnnnnnnnnnnnnnnnnnnnnnnnnnnnnnnnnnnnnnnnnnnnnnnnnnnnnnnnnnnnnnnnnnnnnnnnnnnnnnnnnnnnnnnnnnnnnnnnnnnnnnnnnnnnnnnnnnnnnnnnnnnnnnnnnnnnnnnnnnnnnnnnnnnnnnnnnnnnnnnnnnnnnnnnnnnnnnnnnnnnnnnnnnnnnnnnnnnnnnnnnnnnnnnnnnnnnnnnnnnnnnnnnnnnnnnnnnnnnnnnnnnnnnnnnnnnnnnnnnnnnnnnnnnnnnnnnnnnnnnnnnnnnnnnnnnnnnnnnnnnnnnnnnnnnnnnnnnnnnnnnnnnnnnnnnnnnnnnnnnnnnnnnnnnnnnnnnnnnnnnnnnnnnnnnnnnnnnnnnnnnnnnnnnnnnnnnnnnnnnnnnnnnnnnnnnnnnnnnnnnnnnnnnnnnnnnnnnnnnnnnnnnnnnnnnnnnnnnnnnnnnnnnnnnnnnnnnnnnnnnnnnnnnnnnnnnnnnnnnnnnnnnnnnnnnnnnnnnnnnnnnnnnnnnnnnnnnnnnnnnnnnnnnnnnnnnnnnnnnnnnnnnnnnnnnnnnnnnnnnnnnnnnnnnnnnnnnnnnnnnnnnnnnnnnnnnnnnnnnnnnnnnnnnnnnnnnnnnnnnnnnnnnnnnnnnnnnnnnnnnnnnnnnnnnnnnnnnnnnnnnnnnnnnnnnnnnnnnnnnnnnnnnnnnnnnnnnnnnnnnnnnnnnnnnnnnnnnnnnnnnnnnnnnnnnnnnnnnnnnnnnnnnnnnnnnnnnnnnnnnnnnnnnnnnnnnnnnnnnnnnnnnnnnnnnnnnnnnnnnnnnnnnnnnnnnnnnnnnnnnnnnnnnnnnnnnnnnnnnnnnnnnnnnnnnnnnnnnnnnnnnnnnnnnnnnnnnnnnnnnnnnnnnnnnnnnnnnnnnnnnnnnnnnnnnnnnnnnnnnnnnnnnnnnnnnnnnnnnnnnnnnnnnnnnnnnnnnnnnnnnnnnnnnnnnnnnnnnnnnnnnnnnnnnnnnnnnnnnnnnnnnnnnnnnnnnnnnnnnnnnnnnnnnnnnnnnnnnnnnnnnnnnnnnnnnnnnnnnnnnnnnnnnnnnnnnnnnnnnnnnnnnnnnnnnnnnnnnnnnnnnnnnnnnnnnnnnnnnnnnnnnnnnnnnnnnnnnnnnnnnnnnnnnnnnnnnnnnnnnnnnnnnnnnnnnnnnnnnnnnnnnnnnnnnnnnnnnnnnnnnnnnnnnnnnnnnnnnnnnnnnnnnnnnnnnnnnnnnnnnnnnnnnnnnnnnnnnnnnnnnnnnnnnnnnnnnnnnnnnnnnnnnnnnnnnnnnnnnnnnnnnnnnnnnnnnnnnnnnnnnnnnnnnnnnnnnnnnnnnnnnnnnnnnnnnnnnnnnnnnnnnnnnnnnnnnnnnnnnnnnnnnnnnnnnnnnnnnnnnnnnnnnnnnnnnnnnnnnnnnnnnnnnnnnnnnnnnnnnnnnnnnnnnnnnnnnnnnnnnnnnnnnnnnnnnnnnnnnnnnnnnnnnnnnnnnnnnnnnnnnnnnnnnnnnnnnnnnnnnnnnnnnnnnnnnnnnnnnnnnnnnnnnnnnnnnnnnnnnnnnnnnnnnnnnnnnnnnnnnnnnnnnnnnnnnnnnnnnnnnnnnnnnnnnnnnnnnnnnnnnnnnnnnnnnnnnnnnnnnnnnnnnnnnnnnnnnnnnnnnnnnnnnnnnnnnnnnnnnnnnnnnnnnnnnnnnnnnnnnnnnnnnnnnnnnnnnnnnnnnnnnnnnnnnnnnnnnnnnnnnnnnnnnnnnnnnnnnnnnnnnnnnnnnnnnnnnnnnnnnnnnnnnnnnnnnnnnnnnnnnnnnnnnnnnnnnnnnnnnnnnnnnnnnnnnnnnnnnnnnnnnnnnnnnnnnnnnnnnnnnnnnnnnnnnnnnnnnnnnnnnnnnnnnnnnnnnnnnnnnnnnnnnnnnnnnnnnnnnnnnnnnnnnnnnnnnnnnnnnnnnnnnnnnnnnnnnnnnnnnnnnnnnnnnnnnnnnnnnnnnnnnnnnnnnnnnnnnnnnnnnnnnnnnnnnnnnnnnnnnnnnnnnnnnnnnnnnnnnnnnnnnnnnnnnnnnnnnnnnnnnnnnnnnnnnnnnnnnnnnnnnnnnnnnnnnnnnnnnnnnnnnnnnnnnnnnnnnnnnnnnnnnnnnnnnnnnnnnnnnnnnnnnnnnnnnnnnnnnnnnnnnnnnnnnnnnnnnnnnnnnnnnnnnnnnnnnnnnnnnnnnnnnnnnnnnnnnnnnnnnnnnnnnnnnnnnnnnnnnnnnnnnnnnnnnnnnnnnnnnnnnnnnnnnnnnnnnnnnnnnnnnnnnnnnnnnnnnnnnnnnnnnnnnnnnnnnnnnnnnnnnnnnnnnnnnnnnnnnnnnnnnnnnnnnnnnnnnnnnnnnnnnnnnnnnnnnnnnnnnnnnnnnnnnnnnnnnnnnnnnnnnnnnnnnnnnnnnnnnnnnnnnnnnnnnnnnnnnnnnnnnnnnnnnnnnnnnnnnnnnnnnnnnnnnnnnnnnnnnnnnnnnnnnnnnnnnnnnnnnnnnnnnnnnnnnnnnnnnnnnnnnnnnnnnnnnnnnnnnnnnnnnnnnnnnnnnnnnnnnnnnnnnnnnnnnnnnnnnnnnnnnnnnnnnnnnnnnnnnnnnnnnnnnnnnnnnnnnnnnnnnnnnnnnnnnnnnnnnnnnnnnnnnnnnnnnnnnnnnnnnnnnnnnnnnnnnnnnnnnnnnnnnnnnnnnnnnnnnnnnnnnnnnnnnnnnnnnnnnnnnnnnnnnnnnnnnnnnnnnnnnnnnnnnnnnnnnnnnnnnnnnnnnnnnnnnnnnnnnnnnnnnnnnnnnnnnnnnnnnnnnnnnnnnnnnnnnnnnnnnnnnnnnnnnnnnnnnnnnnnnnnnnnnnnnnnnnnnnnnnnnnnnnnnnnnnnnnnnnnnnnnnnnnnnnnnnnnnnnnnnnnnnnnnnnnnnnnnnnnnnnnnnnnnnnnnnnnnnnnnnnnnnnnnnnnnnnnnnnnnnnnnnnnnnnnnnnnnnnnnnnnnnnnnnnnnnnnnnnnnnnnnnnnnnnnnnnnnnnnnnnnnnnnnnnnnnnnnnnnnnnnnnnnnnnnnnnnnnnnnnnnnnnnnnnnnnnnnnnnnnnnnnnnnnnnnnnnnnnnnnnnnnnnnnnnnnnnnnnnnnnnnnnnnnnnnnnnnnnnnnnnnnnnnnnnnnnnnnnnnnnnnnnnnnnnnnnnnnnnnnnnnnnnnnnnnnnnnnnnnnnnnnnnnnnnnnnnnnnnnnnnnnnnnnnnnnnnnnnnnnnnnnnnnnnnnnnnnnnnnnnnnnnnnnnnnnnnnnnnnnnnnnnnnnnnnnnnnnnnnnnnnnnnnnnnnnnnnnnnnnnnnnnnnnnnnnnnnnnnnnnnnnnnnnnnnnnnnnnnnnnnnnnnnnnnnnnnnnnnnnnnnnnnnnnnnnnnnnnnnnnnnnnnnnnnnnnnnnnnnnnnnnnnnnnnnnnnnnnnnnnnnnnnnnnnnnnnnnnnnnnnnnnnnnnnnnnnnnnnnnnnnnnnnnnnnnnnnnnnnnnnnnnnnnnnnnnnnnnnnnnnnnnnnnnnnnnnnnnnnnnnnnnnnnnnnnnnnnnnnnnnnnnnnnnnnnnnnnnnnnnnnnnnnnnnnnnnnnnnnnnnnnnnnnnnnnnnnnnnnnnnnnnnnnnnnnnnnnnnnnnnnnnnnnnnnnnnnnnnnnnnnnnnnnnnnnnnnnnnnnnnnnnnnnnnnnnnnnnnnnnnnnnnnnnnnnnnnnnnnnnnnnnnnnnnnnnnnnnnnnnnnnnnnnnnnnnnnnnnnnnnnnnnnnnnnnnnnnnnnnnnnnnnnnnnnnnnnnnnnnnnnnnnnnnnnnnnnnnnnnnnnnnnnnnnnnnnnnnnnnnnnnnnnnnnnnnnnnnnnnnnnnnnnnnnnnnnnnnnnnnnnnnnnnnnnnnnnnnnnnnnnnnnnnnnnnnnnnnnnnnnnnnnnnnnnnnnnnnnnnnnnnnnnnnnnnnnnnnnnnnnnnnnnnnnnnnnnnnnnnnnnnnnnnnnnnnnnnnnnnnnnnnnnnnnnnnnnnnnnnnnnnnnnnnnnnnnnnnnnnnnnnnnnnnnnnnnnnnnnnnnnnnnnnnnnnnnnnnnnnnnnnnnnnnnnnnnnnnnnnnnnnnnnnnnnnnnnnnnnnnnnnnnnnnnnnnnnnnnnnnnnnnnnnnnnnnnnnnnnnnnnnnnnnnnnnnnnnnnnnnnnnnnnnnnnnnnnnnnnnnnnnnnnnnnnnnnnnnnnnnnnnnnnnnnnnnnnnnnnnnnnnnnnnnnnnnnnnnnnnnnnnnnnnnnnnnnnnnnnnnnnnnnnnnnnnnnnnnnnnnnnnnnnnnnnnnnnnnnnnnnnnnnnnnnnnnnnnnnnnnnnnnnnnnnnnnnnnnnnnnnnnnnnnnnnnnnnnnnnnnnnnnnnnnnnnnnnnnnnnnnnnnnnnnnnnnnnnnnnnnnnnnnnnnnnnnnnnnnnnnnnnnnnnnnnnnnnnnnnnnnnnnnnnnnnnnnnnnnnnnnnnnnnnnnnnnnnnnnnnnnnnnnnnnnnnnnnnnnnnnnnnnnnnnnnnnnnnnnnnnnnnnnnnnnnnnnnnnnnnnnnnnnnnnnnnnnnnnnnnnnnnnnnnnnnnnnnnnnnnnnnnnnnnnnnnnnnnnnnnnnnnnnnnnnnnnnnnnnnnnnnnnnnnnnnnnnnnnnnnnnnnnnnnnnnnnnnnnnnnnnnnnnnnnnnnnnnnnnnnnnnnnnnnnnnnnnnnnnnnnnnnnnnnnnnnnnnnnnnnnnnnnnnnnnnnnnnnnnnnnnnnnnnnnnnnnnnnnnnnnnnnnnnnnnnnnnnnnnnnnnnnnnnnnnnnnnnnnnnnnnnnnnnnnnnnnnnnnnnnnnnnnnnnnnnnnnnnnnnnnnnnnnnnnnnnnnnnnnnnnnnnnnnnnnnnnnnnnnnnnnnnnnnnnnnnnnnnnnnnnnnnnnnnnnnnnnnnnnnnnnnnnnnnnnnnnnnnnnnnnnnnnnnnnnnnnnnnnnnnnnnnnnnnnnnnnnnnnnnnnnnnnnnnnnnnnnnnnnnnnnnnnnnnnnnnnnnnnnnnnnnnnnnnnnnnnnnnnnnnnnnnnnnnnnnnnnnnnnnnnnnnnnnnnnnnnnnnnnnnnnnnnnnnnnnnnnnnnnnnnnnnnnnnnnnnnnnnnnnnnnnnnnnnnnnnnnnnnnnnnnnnnnnnnnnnnnnnnnnnnnnnnnnnnnnnnnnnnnnnnnnnnnnnnnnnnnnnnnnnnnnnnnnnnnnnnnnnnnnnnnnnnnnnnnnnnnnnnnnnnnnnnnnnnnnnnnnnnnnnnnnnnnnnnnnnnnnnnnnnnnnnnnnnnnnnnnnnnnnnnnnnnnnnnnnnnnnnnnnnnnnnnnnnnnnnnnnnnnnnnnnnnnnnnnnnnnnnnnnnnnnnnnnnnnnnnnnnnnnnnnnnnnnnnnnnnnnnnnnnnnnnnnnnnnnnnnnnnnnnnnnnnnnnnnnnnnnnnnnnnnnnnnnnnnnnnnnnnnnnnnnnnnnnnnnnnnnnnnnnnnnnnnnnnnnnnnnnnnnnnnnnnnnnnnnnnnnnnnnnnnnnnnnnnnnnnnnnnnnnnnnnnnnnnnnnnnnnnnnnnnnnnnnnnnnnnnnnnnnnnnnnnnnnnnnnnnnnnnnnnnnnnnnnnnnnnnnnnnnnnnnnnnnnnnnnnnnnnnnnnnnnnnnnnnnnnnnnnnnnnnnnnnnnnnnnnnnnnnnnnnnnnnnnnnnnnnnnnnnnnnnnnnnnnnnnnnnnnnnnnnnnnnnnnnnnnnnnnnnnnnnnnnnnnnnnnnnnnnnnnnnnnnnnnnnnnnnnnnnnnnnnnnnnnnnnnnnnnnnnnnnnnnnnnnnnnnnnnnnnnnnnnnnnnnnnnnnnnnnnnnnnnnnnnnnnnnnnnnnnnnnnnnnnnnnnnnnnnnnnnnnnnnnnnnnnnnnnnnnnnnnnnnnnnnnnnnnnnnnnnnnnnnnnnnnnnnnnnnnnnnnnnnnnnnnnnnnnnnnnnnnnnnnnnnnnnnnnnnnnnnnnnnnnnnnnnnnnnnnnnnnnnnnnnnnnnnnnnnnnnnnnnnnnnnnnnnnnnnnnnnnnnnnnnnnnnnnnnnnnnnnnnnnnnnnnnnnnnnnnnnnnnnnnnnnnnnnnnnnnnnnnnnnnnnnnnnnnnnnnnnnnnnnnnnnnnnnnnnnnnnnnnnnnnnnnnnnnnnnnnnnnnnnnnnnnnnnnnnnnnnnnnnnnnnnnnnnnnnnnnnnnnnnnnnnnnnnnnnnnnnnnnnnnnnnnnnnnnnnnnnnnnnnnnnnnnnnnnnnnnnnnnnnnnnnnnnnnnnnnnnnnnnnnnnnnnnnnnnnnnnnnnnnnnnnnnnnnnnnnnnnnnnnnnnnnnnnnnnnnnnnnnnnnnnnnnnnnnnnnnnnnnnnnnnnnnnnnnnnnnnnnnnnnnnnnnnnnnnnnnnnnnnnnnnnnnnnnnnnnnnnnnnnnnnnnnnnnnnnnnnnnnnnnnnnnnnnnnnnnnnnnnnnnnnnnnnnnnnnnnnnnnnnnnnnnnnnnnnnnnnnnnnnnnnnnnnnnnnnnnnnnnnnnnnnnnnnnnnnnnnnnnnnnnnnnnnnnnnnnnnnnnnnnnnnnnnnnnnnnnnnnnnnnnnnnnnnnnnnnnnnnnnnnnnnnnnnnnnnnnnnnnnnnnnnnnnnnnnnnnnnnnnnnnnnnnnnnnnnnnnnnnnnnnnnnnnnnnnnnnnnnnnnnnnnnnnnnnnnnnnnnnnnnnnnnnnnnnnnnnnnnnnnnnnnnnnnnnnnnnnnnnnnnnnnnnnnnnnnnnnnnnnnnnnnnnnnnnnnnnnnnnnnnnnnnnnnnnnnnnnnnnnnnnnnnnnnnnnnnnnnnnnnnnnnnnnnnnnnnnnnnnnnnnnnnnnnnnnnnnnnnnnnnnnnnnnnnnnnnnnnnnnnnnnnnnnnnnnnnnnnnnnnnnnnnnnnnnnnnnnnnnnnnnnnnnnnnnnnnnnnnnnnnnnnnnnnnnnnnnnnnnnnnnnnnnnnnnnnnnnnnnnnnnnnnnnnnnnnnnnnnnnnnnnnnnnnnnnnnnnnnnnnnnnnnnnnnnnnnnnnnnnnnnnnnnnnnnnnnnnnnnnnnnnnnnnnnnnnnnnnnnnnnnnnnnnnnnnnnnnnnnnnnnnnnnnnnnnnnnnnnnnnnnnnnnnnnnnnnnnnnnnnnnnnnnnnnnnnnnnnnnnnnnnnnnnnnnnnnnnnnnnnnnnnnnnnnnnnnnnnnnnnnnnnnnnnnnnnnnnnnnnnnnnnnnnnnnnnnnnnnnnnnnnnnnnnnnnnnnnnnnnnnnnnnnnnnnnnnnnnnnnnnnnnnnnnnnnnnnnnnnnnnnnnnnnnnnnnnnnnnnnnnnnnnnnnnnnnnnnnnnnnnnnnnnnnnnnnnnnnnnnnnnnnnnnnnnnnnnnnnnnnnnnnnnnnnnnnnnnnnnnnnnnnnnnnnnnnnnnnnnnnnnnnnnnnnnnnnnnnnnnnnnnnnnnnnnnnnnnnnnnnnnnnnnnnnnnnnnnnnnnnnnnnnnnnnnnnnnnnnnnnnnnnnnnnnnnnnnnnnnnnnnnnnnnnnnnnnnnnnnnnnnnnnnnnnnnnnnnnnnnnnnnnnnnnnnnnnnnnnnnnnnnnnnnnnnnnnnnnnnnnnnnnnnnnnnnnnnnnnnnnnnnnnnnnnnnnnnnnnnnnnnnnnnnnnnnnnnnnnnnnnnnnnnnnnnnnnnnnnnnnnnnnnnnnnnnnnnnnnnnnnnnnnnnnnnnnnnnnnnnnnnnnnnnnnnnnnnnnnnnnnnnnnnnnnnnnnnnnnnnnnnnnnnnnnnnnnnnnnnnnnnnnnnnnnnnnnnnnnnnnnnnnnnnnnnnnnnnnnnnnnnnnnnnnnnnnnnnnnnnnnnnnnnnnnnnnnnnnnnnnnnnnnnnnnnnnnnnnnnnnnnnnnnnnnnnnnnnnnnnnnnnnnnnnnnnnnnnnnnnnnnnnnnnnnnnnnnnnnnnnnnnnnnnnnnnnnnnnnnnnnnnnnnnnnnnnnnnnnnnnnnnnnnnnnnnnnnnnnnnnnnnnnnnnnnnnnnnnnnnnnnnnnnnnnnnnnnnnnnnnnnnnnnnnnnnnnnnnnnnnnnnnnnnnnnnnnnnnnnnnnnnnnnnnnnnnnnnnnnnnnnnnnnnnnnnnnnnnnnnnnnnnnnnnnnnnnnnnnnnnnnnnnnnnnnnnnnnnnnnnnnnnnnnnnnnnnnnnnnnnnnnnnnnnnnnnnnnnnnnnnnnnnnnnnnnnnnnnnnnnnnnnnnnnnnnnnnnnnnnnnnnnnnnnnnnnnnnnnnnnnnnnnnnnnnnnnnnnnnnnnnnnnnnnnnnnnnnnnnnnnnnnnnnnnnnnnnnnnnnnnnnnnnnnnnnnnnnnnnnnnnnnnnnnnnnnnnnnnnnnnnnnnnnnnnnnnnnnnnnnnnnnnnnnnnnnnnnnnnnnnnnnnnnnnnnnnnnnnnnnnnnnnnnnnnnnnnnnnnnnnnnnnnnnnnnnnnnnnnnnnnnnnnnnnnnnnnnnnnnnnnnnnnnnnnnnnnnnnnnnnnnnnnnnnnnnnnnnnnnnnnnnnnnnnnnnnnnnnnnnnnnnnnnnnnnnnnnnnnnnnnnnnnnnnnnnnnnnnnnnnnnnnnnnnnnnnnnnnnnnnnnnnnnnnnnnnnnnnnnnnnnnnnnnnnnnnnnnnnnnnnnnnnnnnnnnnnnnnnnnnnnnnnnnnnnnnnnnnnnnnnnnnnnnnnnnnnnnnnnnnnnnnnnnnnnnnnnnnnnnnnnnnnnnnnnnnnnnnnnnnnnnnnnnnnnnnnnnnnnnnnnnnnnnnnnnnnnnnnnnnnnnnnnnnnnnnnnnnnnnnnnnnnnnnnnnnnnnnnnnnnnnnnnnnnnnnnnnnnnnnnnnnnnnnnnnnnnnnnnnnnnnnnnnnnnnnnnnnnnnnnnnnnnnnnnnnnnnnnnnnnnnnnnnnnnnnnnnnnnnnnnnnnnnnnnnnnnnnnnnnnnnnnnnnnnnnnnnnnnnnnnnnnnnnnnnnnnnnnnnnnnnnnnnnnnnnnnnnnnnnnnnnnnnnnnnnnnnnnnnnnnnnnnnnnnnnnnnnnnnnnnnnnnnnnnnnnnnnnnnnnnnnnnnnnnnnnnnnnnnnnnnnnnnnnnnnnnnnnnnnnnnnnnnnnnnnnnnnnnnnnnnnnnnnnnnnnnnnnnnnnnnnnnnnnnnnnnnnnnnnnnnnnnnnnnnnnnnnnnnnnnnnnnnnnnnnnnnnnnnnnnnnnnnnnnnnnnnnnnnnnnnnnnnnnnnnnnnnnnnnnnnnnnnnnnnnnnnnnnnnnnnnnnnnnnnnnnnnnnnnnnnnnnnnnnnnnnnnnnnnnnnnnnnnnnnnnnnnnnnnnnnnnnnnnnnnnnnnnnnnnnnnnnnnnnnnnnnnnnnnnnnnnnnnnnnnnnnnnnnnnnnnnnnnnnnnnnnnnnnnnnnnnnnnnnnnnnnnnnnnnnnnnnnnnnnnnnnnnnnnnnnnnnnnnnnnnnnnnnnnnnnnnnnnnnnnnnnnnnnnnnnnnnnnnnnnnnnnnnnnnnnnnnnnnnnnnnnnnnnnnnnnnnnnnnnnnnnnnnnnnnnnnnnnnnnnnnnnnnnnnnnnnnnnnnnnnnnnnnnnnnnnnnnnnnnnnnnnnnnnnnnnnnnnnnnnnnnnnnnnnnnnnnnnnnnnnnnnnnnnnnnnnnnnnnnnnnnnnnnnnnnnnnnnnnnnnnnnnnnnnnnnnnnnnnnnnnnnnnnnnnnnnnnnnnnnnnnnnnnnnnnnnnnnnnnnnnnnnnnnnnnnnnnnnnnnnnnnnnnnnnnnnnnnnnnnnnnnnnnnnnnnnnnnnnnnnnnnnnnnnnnnnnnnnnnnnnnnnnnnnnnnnnnnnnnnnnnnnnnnnnnnnnnnnnnnnnnnnnnnnnnnnnnnnnnnnnnnnnnnnnnnnnnnnnnnnnnnnnnnnnnnnnnnnnnnnnnnnnnnnnnnnnnnnnnnnnnnnnnnnnnnnnnnnnnnnnnnnnnnnnnnnnnnnnnnnnnnnnnnnnnnnnnnnnnnnnnnnnnnnnnnnnnnnnnnnnnnnnnnnnnnnnnnnnnnnnnnnnnnnnnnnnnnnnnnnnnnnnnnnnnnnnnnnnnnnnnnnnnnnnnnnnnnnnnnnnnnnnnnnnnnnnnnnnnnnnnnnnnnnnnnnnnnnnnnnnnnnnnnnnnnnnnnnnnnnnnnnnnnnnnnnnnnnnnnnnnnnnnnnnnnnnnnnnnnnnnnnnnnnnnnnnnnnnnnnnnnnnnnnnnnnnnnnnnnnnnnnnnnnnnnnnnnnnnnnnnnnnnnnnnnnnnnnnnnnnnnnnnnnnnnnnnnnnnnnnnnnnnnnnnnnnnnnnnnnnnnnnnnnnnnnnnnnnnnnnnnnnnnnnnnnnnnnnnnnnnnnnnnnnnnnnnnnnnnnnnnnnnnnnnnnnnnnnnnnnnnnnnnnnnnnnnnnnnnnnnnnnnnnnnnnnnnnnnnnnnnnnnnnnnnnnnnnnnnnnnnnnnnnnnnnnnnnnnnnnnnnnnnnnnnnnnnnnnnnnnnnnnnnnnnnnnnnnnnnnnnnnnnnnnnnnnnnnnnnnnnnnnnnnnnnnnnnnnnnnnnnnnnnnnnnnnnnnnnnnnnnnnnnnnnnnnnnnnnnnnnnnnnnnnnnnnnnnnnnnnnnnnnnnnnnnnnnnnnnnnnnnnnnnnnnnnnnnnnnnnnnnnnnnnnnnnnnnnnnnnnnnnnnnnnnnnnnnnnnnnnnnnnnnnnnnnnnnnnnnnnnnnnnnnnnnnnnnnnnnnnnnnnnnnnnnnnnnnnnnnnnnnnnnnnnnnnnnnnnnnnnnnnnnnnnnnnnnnnnnnnnnnnnnnnnnnnnnnnnnnnnnnnnnnnnnnnnnnnnnnnnnnnnnnnnnnnnnnnnnnnnnnnnnnnnnnnnnnnnnnnnnnnnnnnnnnnnnnnnnnnnnnnnnnnnnnnnnnnnnnnnnnnnnnnnnnnnnnnnnnnnnnnnnnnnnnnnnnnnnnnnnnnnnnnnnnnnnnnnnnnnnnnnnnnnnnnnnnnnnnnnnnnnnnnnnnnnnnnnnnnnnnnnnnnnnnnnnnnnnnnnnnnnnnnnnnnnnnnnnnnnnnnnnnnnnnnnnnnnnnnnnnnnnnnnnnnnnnnnnnnnnnnnnnnnnnnnnnnnnnnnnnnnnnnnnnnnnnnnnnnnnnnnnnnnnnnnnnnnnnnnnnnnnnnnnnnnnnnnnnnnnnnnnnnnnnnnnnnnnnnnnnnnnnnnnnnnnnnnnnnnnnnnnnnnnnnnnnnnnnnnnnnnnnnnnnnnnnnnnnnnnnnnnnnnnnnnnnnnnnnnnnnnnnnnnnnnnnnnnnnnnnnnnnnnnnnnnnnnnnnnnnnnnnnnnnnnnnnnnnnnnnnnnnnnnnnnnnnnnnnnnnnnnnnnnnnnnnnnnnnnnnnnnnnnnnnnnnnnnnnnnnnnnnnnnnnnnnnnnnnnnnnnnnnnnnnnnnnnnnnnnnnnnnnnnnnnnnnnnnnnnnnnnnnnnnnnnnnnnnnnnnnnnnnnnnnnnnnnnnnnnnnnnnnnnnnnnnnnnnnnnnnnnnnnnnnnnnnnnnnnnnnnnnnnnnnnnnnnnnnnnnnnnnnnnnnnnnnnnnnnnnnnnnnnnnnnnnnnnnnnnnnnnnnnnnnnnnnnnnnnnnnnnnnnnnnnnnnnnnnnnnnnnnnnnnnnnnnnnnnnnnnnnnnnnnnnnnnnnnnnnnnnnnnnnnnnnnnnnnnnnnnnnnnnnnnnnnnnnnnnnnnnnnnnnnnnnnnnnnnnnnnnnnnnnnnnnnnnnnnnnnnnnnnnnnnnnnnnnnnnnnnnnnnnnnnnnnnnnnnnnnnnnnnnnnnnnnnnnnnnnnnnnnnnnnnnnnnnnnnnnnnnnnnnnnnnnnnnnnnnnnnnnnnnnnnnnnnnnnnnnnnnnnnnnnnnnnnnnnnnnnnnnnnnnnnnnnnnnnnnnnnnnnnnnnnnnnnnnnnnnnnnnnnnnnnnnnnnnnnnnnnnnnnnnnnnnnnnnnnnnnnnnnnnnnnnnnnnnnnnnnnnnnnnnnnnnnnnnnnnnnnnnnnnnnnnnnnnnnnnnnnnnnnnnnnnnnnnnnnnnnnnnnnnnnnnnnnnnnnnnnnnnnnnnnnnnnnnnnnnnnnnnnnnnnnnnnnnnnnnnnnnnnnnnnnnnnnnnnnnnnnnnnnnnnnnnnnnnnnnnnnnnnnnnnnnnnnnnnnnnnnnnnnnnnnnnnnnnnnnnnnnnnnnnnnnnnnnnnnnnnnnnnnnnnnnnnnnnnnnnnnnnnnnnnnnnnnnnnnnnnnnnnnnnnnnnnnnnnnnnnnnnnnnnnnnnnnnnnnnnnnnnnnnnnnnnnnnnnnnnnnnnnnnnnnnnnnnnnnnnnnnnnnnnnnnnnnnnnnnnnnnnnnnnnnnnnnnnnnnnnnnnnnnnnnnnnnnnnnnnnnnnnnnnnnnnnnnnnnnnnnnnnnnnnnnnnnnnnnnnnnnnnnnnnnnnnnnnnnnnnnnnnnnnnnnnnnnnnnnnnnnnnnnnnnnnnnnnnnnnnnnnnnnnnnnnnnnnnnnnnnnnnnnnnnnnnnnnnnnnnnnnnnnnnnnnnnnnnnnnnnnnnnnnnnnnnnnnnnnnnnnnnnnnnnnnnnnnnnnnnnnnnnnnnnnnnnnnnnnnnnnnnnnnnnnnnnnnnnnnnnnnnnnnnnnnnnnnnnnnnnnnnnnnnnnnnnnnnnnnnnnnnnnnnnnnnnnnnnnnnnnnnnnnnnnnnnnnnnnnnnnnnnnnnnnnnnnnnnnnnnnnnnnnnnnnnnnnnnnnnnnnnnnnnnnnnnnnnnnnnnnnnnnnnnnnnnnnnnnnnnnnnnnnnnnnnnnnnnnnnnnnnnnnnnnnnnnnnnnnnnnnnnnnnnnnnnnnnnnnnnnnnnnnnnnnnnnnnnnnnnnnnnnnnnnnnnnnnnnnnnnnnnnnnnnnnnnnnnnnnnnnnnnnnnnnnnnnnnnnnnnnnnnnnnnnnnnnnnnnnnnnnnnnnnnnnnnnnnnnnnnnnnnnnnnnnnnnnnnnnnnnnnnnnnnnnnnnnnnnnnnnnnnnnnnnnnnnnnnnnnnnnnnnnnnnnnnnnnnnnnnnnnnnnnnnnnnnnnnnnnnnnnnnnnnnnnnnnnnnnnnnnnnnnnnnnnnnnnnnnnnnnnnnnnnnnnnnnnnnnnnnnnnnnnnnnnnnnnnnnnnnnnnnnnnnnnnnnnnnnnnnnnnnnnnnnnnnnnnnnnnnnnnnnnnnnnnnnnnnnnnnnnnnnnnnnnnnnnnnnnnnnnnnnnnnnnnnnnnnnnnnnnnnnnnnnnnnnnnnnnnnnnnnnnnnnnnnnnnnnnnnnnnnnnnnnnnnnnnnnnnnnnnnnnnnnnnnnnnnnnnnnnnnnnnnnnnnnnnnnnnnnnnnnnnnnnnnnnnnnnnnnnnnnnnnnnnnnnnnnnnnnnnnnnnnnnnnnnnnnnnnnnnnnnnnnnnnnnnnnnnnnnnnnnnnnnnnnnnnnnnnnnnnnnnnnnnnnnnnnnnnnnnnnnnnnnnnnnnnnnnnnnnnnnnnnnnnnnnnnnnnnnnnnnnnnnnnnnnnnnnnnnnnnnnnnnnnnnnnnnnnnnnnnnnnnnnnnnnnnnnnnnnnnnnnnnnnnnnnnnnnnnnnnnnnnnnnnnnnnnnnnnnnnnnnnnnnnnnnnnnnnnnnnnnnnnnnnnnnnnnnnnnnnnnnnnnnnnnnnnnnnnnnnnnnnnnnnnnnnnnnnnnnnnnnnnnnnnnnnnnnnnnnnnnnnnnnnnnnnnnnnnnnnnnnnnnnnnnnnnnnnnnnnnnnnnnnnnnnnnnnnnnnnnnnnnnnnnnnnnnnnnnnnnnnnnnnnnnnnnnnnnnnnnnnnnnnnnnnnnnnnnnnnnnnnnnnnnnnnnnnnnnnnnnnnnnnnnnnnnnnnnnnnnnnnnnnnnnnnnnnnnnnnnnnnnnnnnnnnnnnnnnnnnnnnnnnnnnnnnnnnnnnnnnnnnnnnnnnnnnnnnnnnnnnnnnnnnnnnnnnnnnnnnnnnnnnnnnnnnnnnnnnnnnnnnnnnnnnnnnnnnnnnnnnnnnnnnnnnnnnnnnnnnnnnnnnnnnnnnnnnnnnnnnnnnnnnnnnnnnnnnnnnnnnnnnnnnnnnnnnnnnnnnnnnnnnnnnnnnnnnnnnnnnnnnnnnnnnnnnnnnnnnnnnnnnnnnnnnnnnnnnnnnnnnnnnnnnnnnnnnnnnnnnnnnnnnnnnnnnnnnnnnnnnnnnnnnnnnnnnnnnnnnnnnnnnnnnnnnnnnnnnnnnnnnnnnnnnnnnnnnnnnnnnnnnnnnnnnnnnnnnnnnnnnnnnnnnnnnnnnnnnnnnnnnnnnnnnnnnnnnnnnnnnnnnnnnnnnnnnnnnnnnnnnnnnnnnnnnnnnnnnnnnnnnnnnnnnnnnnnnnnnnnnnnnnnnnnnnnnnnnnnnnnnnnnnnnnnnnnnnnnnnnnnnnnnnnnnnnnnnnnnnnnnnnnnnnnnnnnnnnnnnnnnnnnnnnnnnnnnnnnnnnnnnnnnnnnnnnnnnnnnnnnnnnnnnnnnnnnnnnnnnnnnnnnnnnnnnnnnnnnnnnnnnnnnnnnnnnnnnnnnnnnnnnnnnnnnnnnnnnnnnnnnnnnnnnnnnnnnnnnnnnnnnnnnnnnnnnnnnnnnnnnnnnnnnnnnnnnnnnnnnnnnnnnnnnnnnnnnnnnnnnnnnnnnnnnnnnnnnnnnnnnnnnnnnnnnnnnnnnnnnnnnnnnnnnnnnnnnnnnnnnnnnnnnnnnnnnnnnnnnnnnnnnnnnnnnnnnnnnnnnnnnnnnnnnnnnnnnnnnnnnnnnnnnnnnnnnnnnnnnnnnnnnnnnnnnnnnnnnnnnnnnnnnnnnnnnnnnnnnnnnnnnnnnnnnnnnnnnnnnnnnnnnnnnnnnnnnnnnnnnnnnnnnnnnnnnnnnnnnnnnnnnnnnnnnnnnnnnnnnnnnnnnnnnnnnnnnnnnnnnnnnnnnnnnnnnnnnnnnnnnnnnnnnnnnnnnnnnnnnnnnnnnnnnnnnnnnnnnnnnnnnnnnnnnnnnnnnnnnnnnnnnnnnnnnnnnnnnnnnnnnnnnnnnnnnnnnnnnnnnnnnnnnnnnnnnnnnnnnnnnnnnnnnnnnnnnnnnnnnnnnnnnnnnnnnnnnnnnnnnnnnnnnnnnnnnnnnnnnnnnnnnnnnnnnnnnnnnnnnnnnnnnnnnnnnnnnnnnnnnnnnnnnnnnnnnnnnnnnnnnnnnnnnnnnnnnnnnnnnnnnnnnnnnnnnnnnnnnnnnnnnnnnnnnnnnnnnnnnnnnnnnnnnnnnnnnnnnnnnnnnnnnnnnnnnnnnnnnnnnnnnnnnnnnnnnnnnnnnnnnnnnnnnnnnnnnnnnnnnnnnnnnnnnnnnnnnnnnnnnnnnnnnnnnnnnnnnnnnnnnnnnnnnnnnnnnnnnnnnnnnnnnnnnnnnnnnnnnnnnnnnnnnnnnnnnnnnnnnnnnnnnnnnnnnnnnnnnnnnnnnnnnnnnnnnnnnnnnnnnnnnnnnnnnnnnnnnnnnnnnnnnnnnnnnnnnnnnnnnnnnnnnnnnnnnnnnnnnnnnnnnnnnnnnnnnnnnnnnnnnnnnnnnnnnnnnnnnnnnnnnnnnnnnnnnnnnnnnnnnnnnnnnnnnnnnnnnnnnnnnnnnnnnnnnnnnnnnnnnnnnnnnnnnnnnnnnnnnnnnnnnnnnnnnnnnnnnnnnnnnnnnnnnnnnnnnnnnnnnnnnnnnnnnnnnnnnnnnnnnnnnnnnnnnnnnnnnnnnnnnnnnnnnnnnnnnnnnnnnnnnnnnnnnnnnnnnnnnnnnnnnnnnnnnnnnnnnnnnnnnnnnnnnnnnnnnnnnnnnnnnnnnnnnnnnnnnnnnnnnnnnnnnnnnnnnnnnnnnnnnnnnnnnnnnnnnnnnnnnnnnnnnnnnnnnnnnnnnnnnnnnnnnnnnnnnnnnnnnnnnnnnnnnnnnnnnnnnnnnnnnnnnnnnnnnnnnnnnnnnnnnnnnnnnnnnnnnnnnnnnnnnnnnnnnnnnnnnnnnnnnnnnnnnnnnnnnnnnnnnnnnnnnnnnnnnnnnnnnnnnnnnnnnnnnnnnnnnnnnnnnnnnnnnnnnnnnnnnnnnnnnnnnnnnnnnnnnnnnnnnnnnnnnnnnnnnnnnnnnnnnnnnnnnnnnnnnnnnnnnnnnnnnnnnnnnnnnnnnnnnnnnnnnnnnnnnnnnnnnnnnnnnnnnnnnnnnnnnnnnnnnnnnnnnnnnnnnnnnnnnnnnnnnnnnnnnnnnnnnnnnnnnnnnnnnnnnnnnnnnnnnnnnnnnnnnnnnnnnnnnnnnnnnnnnnnnnnnnnnnnnnnnnnnnnnnnnnnnnnnnnnnnnnnnnnnnnnnnnnnnnnnnnnnnnnnnnnnnnnnnnnnnnnnnnnnnnnnnnnnnnnnnnnnnnnnnnnnnnnnnnnnnnnnnnnnnnnnnnnnnnnnnnnnnnnnnnnnnnnnnnnnnnnnnnnnnnnnnnnnnnnnnnnnnnnnnnnnnnnnnnnnnnnnnnnnnnnnnnnnnnnnnnnnnnnnnnnnnnnnnnnnnnnnnnnnnnnnnnnnnnnnnnnnnnnnnnnnnnnnnnnnnnnnnnnnnnnnnnnnnnnnnnnnnnnnnnnnnnnnnnnnnnnnnnnnnnnnnnnnnnnnnnnnnnnnnnnnnnnnnnnnnnnnnnnnnnnnnnnnnnnnnnnnnnnnnnnnnnnnnnnnnnnnnnnnnnnnnnnnnnnnnnnnnnnnnnnnnnnnnnnnnnnnnnnnnnnnnnnnnnnnnnnnnnnnnnnnnnnnnnnnnnnnnnnnnnnnnnnnnnnnnnnnnnnnnnnnnnnnnnnnnnnnnnnnnnnnnnnnnnnnnnnnnnnnnnnnnnnnnnnnnnnnnnnnnnnnnnnnnnnnnnnnnnnnnnnnnnnnnnnnnnnnnnnnnnnnnnnnnnnnnnnnnnnnnnnnnnnnnnnnnnnnnnnnnnnnnnnnnnnnnnnnnnnnnnnnnnnnnnnnnnnnnnnnnnnnnnnnnnnnnnnnnnnnnnnnnnnnnnnnnnnnnnnnnnnnnnnnnnnnnnnnnnnnnnnnnnnnnnnnnnnnnnnnnnnnnnnnnnnnnnnnnnnnnnnnnnnnnnnnnnnnnnnnnnnnnnnnnnnnnnnnnnnnnnnnnnnnnnnnnnnnnnnnnnnnnnnnnnnnnnnnnnnnnnnnnnnnnnnnnnnnnnnnnnnnnnnnnnnnnnnnnnnnnnnnnnnnnnnnnnnnnnnnnnnnnnnnnnnnnnnnnnnnnnnnnnnnnnnnnnnnnnnnnnnnnnnnnnnnnnnnnnnnnnnnnnnnnnnnnnnnnnnnnnnnnnnnnnnnnnnnnnnnnnnnnnnnnnnnnnnnnnnnnnnnnnnnnnnnnnnnnnnnnnnnnnnnnnnnnnnnnnnnnnnnnnnnnnnnnnnnnnnnnnnnnnnnnnnnnnnnnnnnnnnnnnnnnnnnnnnnnnnnnnnnnnnnnnnnnnnnnnnnnnnnnnnnnnnnnnnnnnnnnnnnnnnnnnnnnnnnnnnnnnnnnnnnnnnnnnnnnnnnnnnnnnnnnnnnnnnnnnnnnnnnnnnnnnnnnnnnnnnnnnnnnnnnnnnnnnnnnnnnnnnnnnnnnnnnnnnnnnnnnnnnnnnnnnnnnnnnnnnnnnnnnnnnnnnnnnnnnnnnnnnnnnnnnnnnnnnnnnnnnnnnnnnnnnnnnnnnnnnnnnnnnnnnnnnnnnnnnnnnnnnnnnnnnnnnnnnnnnnnnnnnnnnnnnnnnnnnnnnnnnnnnnnnnnnnnnnnnnnnnnnnnnnnnnnnnnnnnnnnnnnnnnnnnnnnnnnnnnnnnnnnnnnnnnnnnnnnnnnnnnnnnnnnnnnnnnnnnnnnnnnnnnnnnnnnnnnnnnnnnnnnnnnnnnnnnnnnnnnnnnnnnnnnnnnnnnnnnnnnnnnnnnnnnnnnnnnnnnnnnnnnnnnnnnnnnnnnnnnnnnnnnnnnnnnnnnnnnnnnnnnnnnnnnnnnnnnnnnnnnnnnnnnnnnnnnnnnnnnnnnnnnnnnnnnnnnnnnnnnnnnnnnnnnnnnnnnnnnnnnnnnnnnnnnnnnnnnnnnnnnnnnnnnnnnnnnnnnnnnnnnnnnnnnnnnnnnnnnnnnnnnnnnnnnnnnnnnnnnnnnnnnnnnnnnnnnnnnnnnnnnnnnnnnnnnnnnnnnnnnnnnnnnnnnnnnnnnnnnnnnnnnnnnnnnnnnnnnnnnnnnnnnnnnnnnnnnnnnnnnnnnnnnnnnnnnnnnnnnnnnnnnnnnnnnnnnnnnnnnnnnnnnnnnnnnnnnnnnnnnnnnnnnnnnnnnnnnnnnnnnnnnnnnnnnnnnnnnnnnnnnnnnnnnnnnnnnnnnnnnnnnnnnnnnnnnnnnnnnnnnnnnnnnnnnnnnnnnnnnnnnnnnnnnnnnnnnnnnnnnnnnnnnnnnnnnnnnnnnnnnnnnnnnnnnnnnnnnnnnnnnnnnnnnnnnnnnnnnnnnnnnnnnnnnnnnnnnnnnnnnnnnnnnnnnnnnnnnnnnnnnnnnnnnnnnnnnnnnnnnnnnnnnnnnnnnnnnnnnnnnnnnnnnnnnnnnnnnnnnnnnnnnnnnnnnnnnnnnnnnnnnnnnnnnnnnnnnnnnnnnnnnnnnnnnnnnnnnnnnnnnnnnnnnnnnnnnnnnnnnnnnnnnnnnnnnnnnnnnnnnnnnnnnnnnnnnnnnnnnnnnnnnnnnnnnnnnnnnnnnnnnnnnnnnnnnnnnnnnnnnnnnnnnnnnnnnnnnnnnnnnnnnnnnnnnnnnnnnnnnnnnnnnnnnnnnnnnnnnnnnnnnnnnnnnnnnnnnnnnnnnnnnnnnnnnnnnnnnnnnnnnnnnnnnnnnnnnnnnnnnnnnnnnnnnnnnnnnnnnnnnnnnnnnnnnnnnnnnnnnnnnnnnnnnnnnnnnnnnnnnnnnnnnnnnnnnnnnnnnnnnnnnnnnnnnnnnnnnnnnnnnnnnnnnnnnnnnnnnnnnnnnnnnnnnnnnnnnnnnnnnnnnnnnnnnnnnnnnnnnnnnnnnnnnnnnnnnnnnnnnnnnnnnnnnnnnnnnnnnnnnnnnnnnnnnnnnnnnnnnnnnnnnnnnnnnnnnnnnnnnnnnnnnnnnnnnnnnnnnnnnnnnnnnnnnnnnnnnnnnnnnnnnnnnnnnnnnnnnnnnnnnnnnnnnnnnnnnnnnnnnnnnnnnnnnnnnnnnnnnnnnnnnnnnnnnnnnnnnnnnnnnnnnnnnnnnnnnnnnnnnnnnnnnnnnnnnnnnnnnnnnnnnnnnnnnnnnnnnnnnnnnnnnnnnnnnnnnnnnnnnnnnnnnnnnnnnnnnnnnnnnnnnnnnnnnnnnnnnnnnnnnnnnnnnnnnnnnnnnnnnnnnnnnnnnnnnnnnnnnnnnnnnnnnnnnnnnnnnnnnnnnnnnnnnnnnnnnnnnnnnnnnnnnnnnnnnnnnnnnnnnnnnnnnnnnnnnnnnnnnnnnnnnnnnnnnnnnnnnnnnnnnnnnnnnnnnnnnnnnnnnnnnnnnnnnnnnnnnnnnnnnnnnnnnnnnnnnnnnnnnnnnnnnnnnnnnnnnnnnnnnnnnnnnnnnnnnnnnnnnnnnnnnnnnnnnnnnnnnnnnnnnnnnnnnnnnnnnnnnnnnnnnnnnnnnnnnnnnnnnnnnnnnnnnnnnnnnnnnnnnnnnnnnnnnnnnnnnnnnnnnnnnnnnnnnnnnnnnnnnnnnnnnnnnnnnnnnnnnnnnnnnnnnnnnnnnnnnnnnnnnnnnnnnnnnnnnnnnnnnnnnnnnnnnnnnnnnnnnnnnnnnnnnnnnnnnnnnnnnnnnnnnnnnnnnnnnnnnnnnnnnnnnnnnnnnnnnnnnnnnnnnnnnnnnnnnnnnnnnnnnnnnnnnnnnnnnnnnnnnnnnnnnnnnnnnnnnnnnnnnnnnnnnnnnnnnnnnnnnnnnnnnnnnnnnnnnnnnnnnnnnnnnnnnnnnnnnnnnnnnnnnnnnnnnnnnnnnnnnnnnnnnnnnnnnnnnnnnnnnnnnnnnnnnnnnnnnnnnnnnnnnnnnnnnnnnnnnnnnnnnnnnnnnnnnnnnnnnnnnnnnnnnnnnnnnnnnnnnnnnnnnnnnnnnnnnnnnnnnnnnnnnnnnnnnnnnnnnnnnnnnnnnnnnnnnnnnnnnnnnnnnnnnnnnnnnnnnnnnnnnnnnnnnnnnnnnnnnnnnnnnnnnnnnnnnnnnnnnnnnnnnnnnnnnnnnnnnnnnnnnnnnnnnnnnnnnnnnnnnnnnnnnnnnnnnnnnnnnnnnnnnnnnnnnnnnnnnnnnnnnnnnnnnnnnnnnnnnnnnnnnnnnnnnnnnnnnnnnnnnnnnnnnnnnnnnnnnnnnnnnnnnnnnnnnnnnnnnnnnnnnnnnnnnnnnnnnnnnnnnnnnnnnnnnnnnnnnnnnnnnnnnnnnnnnnnnnnnnnnnnnnnnnnnnnnnnnnnnnnnnnnnnnnnnnnnnnnnnnnnnnnnnnnnnnnnnnnnnnnnnnnnnnnnnnnnnnnnnnnnnnnnnnnnnnnnnnnnnnnnnnnnnnnnnnnnnnnnnnnnnnnnnnnnnnnnnnnnnnnnnnnnnnnnnnnnnnnnnnnnnnnnnnnnnnnnnnnnnnnnnnnnnnnnnnnnnnnnnnnnnnnnnnnnnnnnnnnnnnnnnnnnnnnnnnnnnnnnnnnnnnnnnnnnnnnnnnnnnnnnnnnnnnnnnnnnnnnnnnnnnnnnnnnnnnnnnnnnnnnnnnnnnnnnnnnnnnnnnnnnnnnnnnnnnnnnnnnnnnnnnnnnnnnnnnnnnnnnnnnnnnnnnnnnnnnnnnnnnnnnnnnnnnnnnnnnnnnnnnnnnnnnnnnnnnnnnnnnnnnnnnnnnnnnnnnnnnnnnnnnnnnnnnnnnnnnnnnnnnnnnnnnnnnnnnnnnnnnnnnnnnnnnnnnnnnnnnnnnnnnnnnnnnnnnnnnnnnnnnnnnnnnnnnnnnnnnnnnnnnnnnnnnnnnnnnnnnnnnnnnnnnnnnnnnnnnnnnnnnnnnnnnnnnnnnnnnnnnnnnnnnnnnnnnnnnnnnnnnnnnnnnnnnnnnnnnnnnnnnnnnnnnnnnnnnnnnnnnnnnnnnnnnnnnnnnnnnnnnnnnnnnnnnnnnnnnnnnnnnnnnnnnnnnnnnnnnnnnnnnnnnnnnnnnnnnnnnnnnnnnnnnnnnnnnnnnnnnnnnnnnnnnnnnnnnnnnnnnnnnnnnnnnnnnnnnnnnnnnnnnnnnnnnnnnnnnnnnnnnnnnnnnnnnnnnnnnnnnnnnnnnnnnnnnnnnnnnnnnnnnnnnnnnnnnnnnnnnnnnnnnnnnnnnnnnnnnnnnnnnnnnnnnnnnnnnnnnnnnnnnnnnnnnnnnnnnnnnnnnnnnnnnnnnnnnnnnnnnnnnnnnnnnnnnnnnnnnnnnnnnnnnnnnnnnnnnnnnnnnnnnnnnnnnnnnnnnnnnnnnnnnnnnnnnnnnnnnnnnnnnnnnnnnnnnnnnnnnnnnnnnnnnnnnnnnnnnnnnnnnnnnnnnnnnnnnnnnnnnnnnnnnnnnnnnnnnnnnnnnnnnnnnnnnnnnnnnnnnnnnnnnnnnnnnnnnnnnnnnnnnnnnnnnnnnnnnnnnnnnnnnnnnnnnnnnnnnnnnnnnnnnnnnnnnnnnnnnnnnnnnnnnnnnnnnnnnnnnnnnnnnnnnnnnnnnnnnnnnnnnnnnnnnnnnnnnnnnnnnnnnnnnnnnnnnnnnnnnnnnnnnnnnnnnnnnnnnnnnnnnnnnnnnnnnnnnnnnnnnnnnnnnnnnnnnnnnnnnnnnnnnnnnnnnnnnnnnnnnnnnnnnnnnnnnnnnnnnnnnnnnnnnnnnnnnnnnnnnnnnnnnnnnnnnnnnnnnnnnnnnnnnnnnnnnnnnnnnnnnnnnnnnnnnnnnnnnnnnnnnnnnnnnnnnnnnnnnnnnnnnnnnnnnnnnnnnnnnnnnnnnnnnnnnnnnnnnnnnnnnnnnnnnnnnnnnnnnnnnnnnnnnnnnnnnnnnnnnnnnnnnnnnnnnnnnnnnnnnnnnnnnnnnnnnnnnnnnnnnnnnnnnnnnnnnnnnnnnnnnnnnnnnnnnnnnnnnnnnnnnnnnnnnnnnnnnnnnnnnnnnnnnnnnnnnnnnnnnnnnnnnnnnnnnnnnnnnnnnnnnnnnnnnnnnnnnnnnnnnnnnnnnnnnnnnnnnnnnnnnnnnnnnnnnnnnnnnnnnnnnnnnnnnnnnnnnnnnnnnnnnnnnnnnnnnnnnnnnnnnnnnnnnnnnnnnnnnnnnnnnnnnnnnnnnnnnnnnnnnnnnnnnnnnnnnnnnnnnnnnnnnnnnnnnnnnnnnnnnnnnnnnnnnnnnnnnnnnnnnnnnnnnnnnnnnnnnnnnnnnnnnnnnnnnnnnnnnnnnnnnnnnnnnnnnnnnnnnnnnnnnnnnnnnnnnnnnnnnnnnnnnnnnnnnnnnnnnnnnnnnnnnnnnnnnnnnnnnnnnnnnnnnnnnnnnnnnnnnnnnnnnnnnnnnnnnnnnnnnnnnnnnnnnnnnnnnnnnnnnnnnnnnnnnnnnnnnnnnnnnnnnnnnnnnnnnnnnnnnnnnnnnnnnnnnnnnnnnnnnnnnnnnnnnnnnnnnnnnnnnnnnnnnnnnnnnnnnnnnnnnnnnnnnnnnnnnnnnnnnnnnnnnnnnnnnnnnnnnnnnnnnnnnnnnnnnnnnnnnnnnnnnnnnnnnnnnnnnnnnnnnnnnnnnnnnnnnnnnnnnnnnnnnnnnnnnnnnnnnnnnnnnnnnnnnnnnnnnnnnnnnnnnnnnnnnnnnnnnnnnnnnnnnnnnnnnnnnnnnnnnnnnnnnnnnnnnnnnnnnnnnnnnnnnnnnnnnnnnnnnnnnnnnnnnnnnnnnnnnnnnnnnnnnnnnnnnnnnnnnnnnnnnnnnnnnnnnnnnnnnnnnnnnnnnnnnnnnnnnnnnnnnnnnnnnnnnnnnnnnnnnnnnnnnnnnnnnnnnnnnnnnnnnnnnnnnnnnnnnnnnnnnnnnnnnnnnnnnnnnnnnnnnnnnnnnnnnnnnnnnnnnnnnnnnnnnnnnnnnnnnnnnnnnnnnnnnnnnnnnnnnnnnnnnnnnnnnnnnnnnnnnnnnnnnnnnnnnnnnnnnnnnnnnnnnnnnnnnnnnnnnnnnnnnnnnnnnnnnnnnnnnnnnnnnnnnnnnnnnnnnnnnnnnnnnnnnnnnnnnnnnnnnnnnnnnnnnnnnnnnnnnnnnnnnnnnnnnnnnnnnnnnnnnnnnnnnnnnnnnnnnnnnnnnnnnnnnnnnnnnnnnnnnnnnnnnnnnnnnnnnnnnnnnnnnnnnnnnnnnnnnnnnnnnnnnnnnnnnnnnnnnnnnnnnnnnnnnnnnnnnnnnnnnnnnnnnnnnnnnnnnnnnnnnnnnnnnnnnnnnnnnnnnnnnnnnnnnnnnnnnnnnnnnnnnnnnnnnnnnnnnnnnnnnnnnnnnnnnnnnnnnnnnnnnnnnnnnnnnnnnnnnnnnnnnnnnnnnnnnnnnnnnnnnnnnnnnnnnnnnnnnnnnnnnnnnnnnnnnnnnnnnnnnnnnnnnnnnnnnnnnnnnnnnnnnnnnnnnnnnnnnnnnnnnnnnnnnnnnnnnnnnnnnnnnnnnnnnnnnnnnnnnnnnnnnnnnnnnnnnnnnnnnnnnnnnnnnnnnnnnnnnnnnnnnnnnnnnnnnnnnnnnnnnnnnnnnnnnnnnnnnnnnnnnnnnnnnnnnnnnnnnnnnnnnnnnnnnnnnnnnnnnnnnnnnnnnnnnnnnnnnnnnnnnnnnnnnnnnnnnnnnnnnnnnnnnnnnnnnnnnnnnnnnnnnnnnnnnnnnnnnnnnnnnnnnnnnnnnnnnnnnnnnnnnnnnnnnnnnnnnnnnnnnnnnnnnnnnnnnnnnnnnnnnnnnnnnnnnnnnnnnnnnnnnnnnnnnnnnnnnnnnnnnnnnnnnnnnnnnnnnnnnnnnnnnnnnnnnnnnnnnnnnnnnnnnnnnnnnnnnnnnnnnnnnnnnnnnnnnnnnnnnnnnnnnnnnnnnnnnnnnnnnnnnnnnnnnnnnnnnnnnnnnnnnnnnnnnnnnnnnnnnnnnnnnnnnnnnnnnnnnnnnnnnnnnnnnnnnnnnnnnnnnnnnnnnnnnnnnnnnnnnnnnnnnnnnnnnnnnnnnnnnnnnnnnnnnnnnnnnnnnnnnnnnnnnnnnnnnnnnnnnnnnnnnnnnnnnnnnnnnnnnnnnnnnnnnnnnnnnnnnnnnnnnnnnnnnnnnnnnnnnnnnnnnnnnnnnnnnnnnnnnnnnnnnnnnnnnnnnnnnnnnnnnnnnnnnnnnnnnnnnnnnnnnnnnnnnnnnnnnnnnnnnnnnnnnnnnnnnnnnnnnnnnnnnnnnnnnnnnnnnnnnnnnnnnnnnnnnnnnnnnnnnnnnnnnnnnnnnnnnnnnnnnnnnnnnnnnnnnnnnnnnnnnnnnnnnnnnnnnnnnnnnnnnnnnnnnnnnnnnnnnnnnnnnnnnnnnnnnnnnnnnnnnnnnnnnnnnnnnnnnnnnnnnnnnnnnnnnnnnnnnnnnnnnnnnnnnnnnnnnnnnnnnnnnnnnnnnnnnnnnnnnnnnnnnnnnnnnnnnnnnnnnnnnnnnnnnnnnnnnnnnnnnnnnnnnnnnnnnnnnnnnnnnnnnnnnnnnnnnnnnnnnnnnnnnnnnnnnnnnnnnnnnnnnnnnnnnnnnnnnnnnnnnnnnnnnnnnnnnnnnnnnnnnnnnnnnnnnnnnnnnnnnnnnnnnnnnnnnnnnnnnnnnnnnnnnnnnnnnnnnnnnnnnnnnnnnnnnnnnnnnnnnnnnnnnnnnnnnnnnnnnnnnnnnnnnnnnnnnnnnnnnnnnnnnnnnnnnnnnnnnnnnnnnnnnnnnnnnnnnnnnnnnnnnnnnnnnnnnnnnnnnnnnnnnnnnnnnnnnnnnnnnnnnnnnnnnnnnnnnnnnnnnnnnnnnnnnnnnnnnnnnnnnnnnnnnnnnnnnnnnnnnnnnnnnnnnnnnnnnnnnnnnnnnnnnnnnnnnnnnnnnnnnnnnnnnnnnnnnnnnnnnnnnnnnnnnnnnnnnnnnnnnnnnnnnnnnnnnnnnnnnnnnnnnnnnnnnnnnnnnnnnnnnnnnnnnnnnnnnnnnnnnnnnnnnnnnnnnnnnnnnnnnnnnnnnnnnnnnnnnnnnnnnnnnnnnnnnnnnnnnnnnnnnnnnnnnnnnnnnnnnnnnnnnnnnnnnnnnnnnnnnnnnnnnnnnnnnnnnnnnnnnnnnnnnnnnnnnnnnnnnnnnnnnnnnnnnnnnnnnnnnnnnnnnnnnnnnnnnnnnnnnnnnnnnnnnnnnnnnnnnnnnnnnnnnnnnnnnnnnnnnnnnnnnnnnnnnnnnnnnnnnnnnnnnnnnnnnnnnnnnnnnnnnnnnnnnnnnnnnnnnnnnnnnnnnnnnnnnnnnnnnnnnnnnnnnnnnnnnnnnnnnnnnnnnnnnnnnnnnnnnnnnnnnnnnnnnnnnnnnnnnnnnnnnnnnnnnnnnnnnnnnnnnnnnnnnnnnnnnnnnnnnnnnnnnnnnnnnnnnnnnnnnnnnnnnnnnnnnnnnnnnnnnnnnnnnnnnnnnnnnnnnnnnnnnnnnnnnnnnnnnnnnnnnnnnnnnnnnnnnnnnnnnnnnnnnnnnnnnnnnnnnnnnnnnnnnnnnnnnnnnnnnnnnnnnnnnnnnnnnnnnnnnnnnnnnnnnnnnnnnnnnnnnnnnnnnnnnnnnnnnnnnnnnnnnnnnnnnnnnnnnnnnnnnnnnnnnnnnnnnnnnnnnnnnnnnnnnnnnnnnnnnnnnnnnnnnnnnnnnnnnnnnnnnnnnnnnnnnnnnnnnnnnnnnnnnnnnnnnnnnnnnnnnnnnnnnnnnnnnnnnnnnnnnnnnnnnnnnnnnnnnnnnnnnnnnnnnnnnnnnnnnnnnnnnnnnnnnnnnnnnnnnnnnnnnnnnnnnnnnnnnnnnnnnnnnnnnnnnnnnnnnnnnnnnnnnnnnnnnnnnnnnnnnnnnnnnnnnnnnnnnnnnnnnnnnnnnnnnnnnnnnnnnnnnnnnnnnnnnnnnnnnnnnnnnnnnnnnnnnnnnnnnnnnnnnnnnnnnnnnnnnnnnnnnnnnnnnnnnnnnnnnnnnnnnnnnnnnnnnnnnnnnnnnnnnnnnnnnnnnnnnnnnnnnnnnnnnnnnnnnnnnnnnnnnnnnnnnnnnnnnnnnnnnnnnnnnnnnnnnnnnnnnnnnnnnnnnnnnnnnnnnnnnnnnnnnnnnnnnnnnnnnnnnnnnnnnnnnnnnnnnnnnnnnnnnnnnnnnnnnnnnnnnnnnnnnnnnnnnnnnnnnnnnnnnnnnnnnnnnnnnnnnnnnnnnnnnnnnnnnnnnnnnnnnnnnnnnnnnnnnnnnnnnnnnnnnnnnnnnnnnnnnnnnnnnnnnnnnnnnnnnnnnnnnnnnnnnnnnnnnnnnnnnnnnnnnnnnnnnnnnnnnnnnnnnnnnnnnnnnnnnnnnnnnnnnnnnnnnnnnnnnnnnnnnnnnnnnnnnnnnnnnnnnnnnnnnnnnnnnnnnnnnnnnnnnnnnnnnnnnnnnnnnnnnnnnnnnnnnnnnnnnnnnnnnnnnnnnnnnnnnnnnnnnnnnnnnnnnnnnnnnnnnnnnnnnnnnnnnnnnnnnnnnnnnnnnnnnnnnnnnnnnnnnnnnnnnnnnnnnnnnnnnnnnnnnnnnnnnnnnnnnnnnnnnnnnnnnnnnnnnnnnnnnnnnnnnnnnnnnnnnnnnnnnnnnnnnnnnnnnnnnnnnnnnnnnnnnnnnnnnnnnnnnnnnnnnnnnnnnnnnnnnnnnnnnnnnnnnnnnnnnnnnnnnnnnnnnnnnnnnnnnnnnnnnnnnnnnnnnnnnnnnnnnnnnnnnnnnnnnnnnnnnnnnnnnnnnnnnnnnnnnnnnnnnnnnnnnnnnnnnnnnnnnnnnnnnnnnnnnnnnnnnnnnnnnnnnnnnnnnnnnnnnnnnnnnnnnnnnnnnnnnnnnnnnnnnnnnnnnnnnnnnnnnnnnnnnnnnnnnnnnnnnnnnnnnnnnnnnnnnnnnnnnnnnnnnnnnnnnnnnnnnnnnnnnnnnnnnnnnnnnnnnnnnnnnnnnnnnnnnnnnnnnnnnnnnnnnnnnnnnnnnnnnnnnnnnnnnnnnnnnnnnnnnnnnnnnnnnnnnnnnnnnnnnnnnnnnnnnnnnnnnnnnnnnnnnnnnnnnnnnnnnnnnnnnnnnnnnnnnnnnnnnnnnnnnnnnnnnnnnnnnnnnnnnnnnnnnnnnnnnnnnnnnnnnnnnnnnnnnnnnnnnnnnnnnnnnnnnnnnnnnnnnnnnnnnnnnnnnnnnnnnnnnnnnnnnnnnnnnnnnnnnnnnnnnnnnnnnnnnnnnnnnnnnnnnnnnnnnnnnnnnnnnnnnnnnnnnnnnnnnnnnnnnnnnnnnnnnnnnnnnnnnnnnnnnnnnnnnnnnnnnnnnnnnnnnnnnnnnnnnnnnnnnnnnnnnnnnnnnnnnnnnnnnnnnnnnnnnnnnnnnnnnnnnnnnnnnnnnnnnnnnnnnnnnnnnnnnnnnnnnnnnnnnnnnnnnnnnnnnnnnnnnnnnnnnnnnnnnnnnnnnnnnnnnnnnnnnnnnnnnnnnnnnnnnnnnnnnnnnnnnnnnnnnnnnnnnnnnnnnnnnnnnnnnnnnnnnnnnnnnnnnnnnnnnnnnnnnnnnnnnnnnnnnnnnnnnnnnnnnnnnnnnnnnnnnnnnnnnnnnnnnnnnnnnnnnnnnnnnnnnnnnnnnnnnnnnnnnnnnnnnnnnnnnnnnnnnnnnnnnnnnnnnnnnnnnnnnnnnnnnnnnnnnnnnnnnnnnnnnnnnnnnnnnnnnnnnnnnnnnnnnnnnnnnnnnnnnnnnnnnnnnnnnnnnnnnnnnnnnnnnnnnnnnnnnnnnnnnnnnnnnnnnnnnnnnnnnnnnnnnnnnnnnnnnnnnnnnnnnnnnnnnnnnnnnnnnnnnnnnnnnnnnnnnnnnnnnnnnnnnnnnnnnnnnnnnnnnnnnnnnnnnnnnnnnnnnnnnnnnnnnnnnnnnnnnnnnnnnnnnnnnnnnnnnnnnnnnnnnnnnnnnnnnnnnnnnnnnnnnnnnnnnnnnnnnnnnnnnnnnnnnnnnnnnnnnnnnnnnnnnnnnnnnnnnnnnnnnnnnnnnnnnnnnnnnnnnnnnnnnnnnnnnnnnnnnnnnnnnnnnnnnnnnnnnnnnnnnnnnnnnnnnnnnnnnnnnnnnnnnnnnnnnnnnnnnnnnnnnnnnnnnnnnnnnnnnnnnnnnnnnnnnnnnnnnnnnnnnnnnnnnnnnnnnnnnnnnnnnnnnnnnnnnnnnnnnnnnnnnnnnnnnnnnnnnnnnnnnnnnnnnnnnnnnnnnnnnnnnnnnnnnnnnnnnnnnnnnnnnnnnnnnnnnnnnnnnnnnnnnnnnnnnnnnnnnnnnnnnnnnnnnnnnnnnnnnnnnnnnnnnnnnnnnnnnnnnnnnnnnnnnnnnnnnnnnnnnnnnnnnnnnnnnnnnnnnnnnnnnnnnnnnnnnnnnnnnnnnnnnnnnnnnnnnnnnnnnnnnnnnnnnnnnnnnnnnnnnnnnnnnnnnnnnnnnnnnnnnnnnnnnnnnnnnnnnnnnnnnnnnnnnnnnnnnnnnnnnnnnnnnnnnnnnnnnnnnnnnnnnnnnnnnnnnnnnnnnnnnnnnnnnnnnnnnnnnnnnnnnnnnnnnnnnnnnnnnnnnnnnnnnnnnnnnnnnnnnnnnnnnnnnnnnnnnnnnnnnnnnnnnnnnnnnnnnnnnnnnnnnnnnnnnnnnnnnnnnnnnnnnnnnnnnnnnnnnnnnnnnnnnnnnnnnnnnnnnnnnnnnnnnnnnnnnnnnnnnnnnnnnnnnnnnnnnnnnnnnnnnnnnnnnnnnnnnnnnnnnnnnnnnnnnnnnnnnnnnnnnnnnnnnnnnnnnnnnnnnnnnnnnnnnnnnnnnnnnnnnnnnnnnnnnnnnnnnnnnnnnnnnnnnnnnnnnnnnnnnnnnnnnnnnnnnnnnnnnnnnnnnnnnnnnnnnnnnnnnnnnnnnnnnnnnnnnnnnnnnnnnnnnnnnnnnnnnnnnnnnnnnnnnnnnnnnnnnnnnnnnnnnnnnnnnnnnnnnnnnnnnnnnnnnnnnnnnnnnnnnnnnnnnnnnnnnnnnnnnnnnnnnnnnnnnnnnnnnnnnnnnnnnnnnnnnnnnnnnnnnnnnnnnnnnnnnnnnnnnnnnnnnnnnnnnnnnnnnnnnnnnnnnnnnnnnnnnnnnnnnnnnnnnnnnnnnnnnnnnnnnnnnnnnnnnnnnnnnnnnnnnnnnnnnnnnnnnnnnnnnnnnnnnnnnnnnnnnnnnnnnnnnnnnnnnnnnnnnnnnnnnnnnnnnnnnnnnnnnnnnnnnnnnnnnnnnnnnnnnnnnnnnnnnnnnnnnnnnnnnnnnnnnnnnnnnnnnnnnnnnnnnnnnnnnnnnnnnnnnnnnnnnnnnnnnnnnnnnnnnnnnnnnnnnnnnnnnnnnnnnnnnnnnnnnnnnnnnnnnnnnnnnnnnnnnnnnnnnnnnnnnnnnnnnnnnnnnnnnnnnnnnnnnnnnnnnnnnnnnnnnnnnnnnnnnnnnnnnnnnnnnnnnnnnnnnnnnnnnnnnnnnnnnnnnnnnnnnnnnnnnnnnnnnnnnnnnnnnnnnnnnnnnnnnnnnnnnnnnnnnnnnnnnnnnnnnnnnnnnnnnnnnnnnnnnnnnnnnnnnnnnnnnnnnnnnnnnnnnnnnnnnnnnnnnnnnnnnnnnnnnnnnnnnnnnnnnnnnnnnnnnnnnnnnnnnnnnnnnnnnnnnnnnnnnnnnnnnnnnnnnnnnnnnnnnnnnnnnnnnnnnnnnnnnnnnnnnnnnnnnnnnnnnnnnnnnnnnnnnnnnnnnnnnnnnnnnnnnnnnnnnnnnnnnnnnnnnnnnnnnnnnnnnnnnnnnnnnnnnnnnnnnnnnnnnnnnnnnnnnnnnnnnnnnnnnnnnnnnnnnnnnnnnnnnnnnnnnnnnnnnnnnnnnnnnnnnnnnnnnnnnnnnnnnnnnnnnnnnnnnnnnnnnnnnnnnnnnnnnnnnnnnnnnnnnnnnnnnnnnnnnnnnnnnnnnnnnnnnnnnnnnnnnnnnnnnnnnnnnnnnnnnnnnnnnnnnnnnnnnnnnnnnnnnnnnnnnnnnnnnnnnnnnnnnnnnnnnnnnnnnnnnnnnnnnnnnnnnnnnnnnnnnnnnnnnnnnnnnnnnnnnnnnnnnnnnnnnnnnnnnnnnnnnnnnnnnnnnnnnnnnnnnnnnnnnnnnnnnnnnnnnnnnnnnnnnnnnnnnnnnnnnnnnnnnnnnnnnnnnnnnnnnnnnnnnnnnnnnnnnnnnnnnnnnnnnnnnnnnnnnnnnnnnnnnnnnnnnnnnnnnnnnnnnnnnnnnnnnnnnnnnnnnnnnnnnnnnnnnnnnnnnnnnnnnnnnnnnnnnnnnnnnnnnnnnnnnnnnnnnnnnnnnnnnnnnnnnnnnnnnnnnnnnnnnnnnnnnnnnnnnnnnnnnnnnnnnnnnnnnnnnnnnnnnnnnnnnnnnnnnnnnnnnnnnnnnnnnnnnnnnnnnnnnnnnnnnnnnnnnnnnnnnnnnnnnnnnnnnnnnnnnnnnnnnnnnnnnnnnnnnnnnnnnnnnnnnnnnnnnnnnnnnnnnnnnnnnnnnnnnnnnnnnnnnnnnnnnnnnnnnnnnnnnnnnnnnnnnnnnnnnnnnnnnnnnnnnnnnnnnnnnnnnnnnnnnnnnnnnnnnnnnnnnnnnnnnnnnnnnnnnnnnnnnnnnnnnnnnnnnnnnnnnnnnnnnnnnnnnnnnnnnnnnnnnnnnnnnnnnnnnnnnnnnnnnnnnnnnnnnnnnnnnnnnnnnnnnnnnnnnnnnnnnnnnnnnnnnnnnnnnnnnnnnnnnnnnnnnnnnnnnnnnnnnnnnnnnnnnnnnnnnnnnnnnnnnnnnnnnnnnnnnnnnnnnnnnnnnnnnnnnnnnnnnnnnnnnnnnnnnnnnnnnnnnnnnnnnnnnnnnnnnnnnnnnnnnnnnnnnnnnnnnnnnnnnnnnnnnnnnnnnnnnnnnnnnnnnnnnnnnnnnnnnnnnnnnnnnnnnnnnnnnnnnnnnnnnnnnnnnnnnnnnnnnnnnnnnnnnnnnnnnnnnnnnnnnnnnnnnnnnnnnnnnnnnnnnnnnnnnnnnnnnnnnnnnnnnnnnnnnnnnnnnnnnnnnnnnnnnnnnnnnnnnnnnnnnnnnnnnnnnnnnnnnnnnnnnnnnnnnnnnnnnnnnnnnnnnnnnnnnnnnnnnnnnnnnnnnnnnnnnnnnnnnnnnnnnnnnnnnnnnnnnnnnnnnnnnnnnnnnnnnnnnnnnnnnnnnnnnnnnnnnnnnnnnnnnnnnnnnnnnnnnnnnnnnnnnnnnnnnnnnnnnnnnnnnnnnnnnnnnnnnnnnnnnnnnnnnnnnnnnnnnnnnnnnnnnnnnnnnnnnnnnnnnnnnnnnnnnnnnnnnnnnnnnnnnnnnnnnnnnnnnnnnnnnnnnnnnnnnnnnnnnnnnnnnnnnnnnnnnnnnnnnnnnnnnnnnnnnnnnnnnnnnnnnnnnnnnnnnnnnnnnnnnnnnnnnnnnnnnnnnnnnnnnnnnnnnnnnnnnnnnnnnnnnnnnnnnnnnnnnnnnnnnnnnnnnnnnnnnnnnnnnnnnnnnnnnnnnnnnnnnnnnnnnnnnnnnnnnnnnnnnnnnnnnnnnnnnnnnnnnnnnnnnnnnnnnnnnnnnnnnnnnnnnnnnnnnnnnnnnnnnnnnnnnnnnnnnnnnnnnnnnnnnnnnnnnnnnnnnnnnnnnnnnnnnnnnnnnnnnnnnnnnnnnnnnnnnnnnnnnnnnnnnnnnnnnnnnnnnnnnnnnnnnnnnnnnnnnnnnnnnnnnnnnnnnnnnnnnnnnnnnnnnnnnnnnnnnnnnnnnnnnnnnnnnnnnnnnnnnnnnnnnnnnnnnnnnnnnnnnnnnnnnnnnnnnnnnnnnnnnnnnnnnnnnnnnnnnnnnnnnnnnnnnnnnnnnnnnnnnnnnnnnnnnnnnnnnnnnnnnnnnnnnnnnnnnnnnnnnnnnnnnnnnnnnnnnnnnnnnnnnnnnnnnnnnnnnnnnnnnnnnnnnnnnnnnnnnnnnnnnnnnnnnnnnnnnnnnnnnnnnnnnnnnnnnnnnnnnnnnnnnnnnnnnnnnnnnnnnnnnnnnnnnnnnnnnnnnnnnnnnnnnnnnnnnnnnnnnnnnnnnnnnnnnnnnnnnnnnnnnnnnnnnnnnnnnnnnnnnnnnnnnnnnnnnnnnnnnnnnnnnnnnnnnnnnnnnnnnnnnnnnnnnnnnnnnnnnnnnnnnnnnnnnnnnnnnnnnnnnnnnnnnnnnnnnnnnnnnnnnnnnnnnnnnnnnnnnnnnnnnnnnnnnnnnnnnnnnnnnnnnnnnnnnnnnnnnnnnnnnnnnnnnnnnnnnnnnnnnnnnnnnnnnnnnnnnnnnnnnnnnnnnnnnnnnnnnnnnnnnnnnnnnnnnnnnnnnnnnnnnnnnnnnnnnnnnnnnnnnnnnnnnnnnnnnnnnnnnnnnnnnnnnnnnnnnnnnnnnnnnnnnnnnnnnnnnnnnnnnnnnnnnnnnnnnnnnnnnnnnnnnnnnnnnnnnnnnnnnnnnnnnnnnnnnnnnnnnnnnnnnnnnnnnnnnnnnnnnnnnnnnnnnnnnnnnnnnnnnnnnnnnnnnnnnnnnnnnnnnnnnnnnnnnnnnnnnnnnnnnnnnnnnnnnnnnnnnnnnnnnnnnnnnnnnnnnnnnnnnnnnnnnnnnnnnnnnnnnnnnnnnnnnnnnnnnnnnnnnnnnnnnnnnnnnnnnnnnnnnnnnnnnnnnnnnnnnnnnnnnnnnnnnnnnnnnnnnnnnnnnnnnnnnnnnnnnnnnnnnnnnnnnnnnnnnnnnnnnnnnnnnnnnnnnnnnnnnnnnnnnnnnnnnnnnnnnnnnnnnnnnnnnnnnnnnnnnnnnnnnnnnnnnnnnnnnnnnnnnnnnnnnnnnnnnnnnnnnnnnnnnnnnnnnnnnnnnnnnnnnnnnnnnnnnnnnnnnnnnnnnnnnnnnnnnnnnnnnnnnnnnnnnnnnnnnnnnnnnnnnnnnnnnnnnnnnnnnnnnnnnnnnnnnnnnnnnnnnnnnnnnnnnnnnnnnnnnnnnnnnnnnnnnnnnnnnnnnnnnnnnnnnnnnnnnnnnnnnnnnnnnnnnnnnnnnnnnnnnnnnnnnnnnnnnnnnnnnnnnnnnnnnnnnnnnnnnnnnnnnnnnnnnnnnnnnnnnnnnnnnnnnnnnnnnnnnnnnnnnnnnnnnnnnnnnnnnnnnnnnnnnnnnnnnnnnnnnnnnnnnnnnnnnnnnnnnnnnnnnnnnnnnnnnnnnnnnnnnnnnnnnnnnnnnnnnnnnnnnnnnnnnnnnnnnnnnnnnnnnnnnnnnnnnnnnnnnnnnnnnnnnnnnnnnnnnnnnnnnnnnnnnnnnnnnnnnnnnnnnnnnnnnnnnnnnnnnnnnnnnnnnnnnnnnnnnnnnnnnnnnnnnnnnnnnnnnnnnnnnnnnnnnnnnnnnnnnnnnnnnnnnnnnnnnnnnnnnnnnnnnnnnnnnnnnnnnnnnnnnnnnnnnnnnnnnnnnnnnnnnnnnnnnnnnnnnnnnnnnnnnnnnnnnnnnnnnnnnnnnnnnnnnnnnnnnnnnnnnnnnnnnnnnnnnnnnnnnnnnnnnnnnnnnnnnnnnnnnnnnnnnnnnnnnnnnnnnnnnnnnnnnnnnnnnnnnnnnnnnnnnnnnnnnnnnnnnnnnnnnnnnnnnnnnnnnnnnnnnnnnnnnnnnnnnnnnnnnnnnnnnnnnnnnnnnnnnnnnnnnnnnnnnnnnnnnnnnnnnnnnnnnnnnnnnnnnnnnnnnnnnnnnnnnnnnnnnnnnnnnnnnnnnnnnnnnnnnnnnnnnnnnnnnnnnnnnnnnnnnnnnnnnnnnnnnnnnnnnnnnnnnnnnnnnnnnnnnnnnnnnnnnnnnnnnnnnnnnnnnnnnnnnnnnnnnnnnnnnnnnnnnnnnnnnnnnnnnnnnnnnnnnnnnnnnnnnnnnnnnnnnnnnnnnnnnnnnnnnnnnnnnnnnnnnnnnnnnnnnnnnnnnnnnnnnnnnnnnnnnnnnnnnnnnnnnnnnnnnnnnnnnnnnnnnnnnnnnnnnnnnnnnnnnnnnnnnnnnnnnnnnnnnnnnnnnnnnnnnnnnnnnnnnnnnnnnnnnnnnnnnnnnnnnnnnnnnnnnnnnnnnnnnnnnnnnnnnnnnnnnnnnnnnnnnnnnnnnnnnnnnnnnnnnnnnnnnnnnnnnnnnnnnnnnnnnnnnnnnnnnnnnnnnnnnnnnnnnnnnnnnnnnnnnnnnnnnnnnnnnnnnnnnnnnnnnnnnnnnnnnnnnnnnnnnnnnnnnnnnnnnnnnnnnnnnnnnnnnnnnnnnnnnnnnnnnnnnnnnnnnnnnnnnnnnnnnnnnnnnnnnnnnnnnnnnnnnnnnnnnnnnnnnnnnnnnnnnnnnnnnnnnnnnnnnnnnnnnnnnnnnnnnnnnnnnnnnnnnnnnnnnnnnnnnnnnnnnnnnnnnnnnnnnnnnnnnnnnnnnnnnnnnnnnnnnnnnnnnnnnnnnnnnnnnnnnnnnnnnnnnnnnnnnnnnnnnnnnnnnnnnnnnnnnnnnnnnnnnnnnnnnnnnnnnnnnnnnnnnnnnnnnnnnnnnnnnnnnnnnnnnnnnnnnnnnnnnnnnnnnnnnnnnnnnnnnnnnnnnnnnnnnnnnnnnnnnnnnnnnnnnnnnnnnnnnnnnnnnnnnnnnnnnnnnnnnnnnnnnnnnnnnnnnnnnnnnnnnnnnnnnnnnnnnnnnnnnnnnnnnnnnnnnnnnnnnnnnnnnnnnnnnnnnnnnnnnnnnnnnnnnnnnnnnnnnnnnnnnnnnnnnnnnnnnnnnnnnnnnnnnnnnnnnnnnnnnnnnnnnnnnnnnnnnnnnnnnnnnnnnnnnnnnnnnnnnnnnnnnnnnnnnnnnnnnnnnnnnnnnnnnnnnnnnnnnnnnnnnnnnnnnnnnnnnnnnnnnnnnnnnnnnnnnnnnnnnnnnnnnnnnnnnnnnnnnnnnnnnnnnnnnnnnnnnnnnnnnnnnnnnnnnnnnnnnnnnnnnnnnnnnnnnnnnnnnnnnnnnnnnnnnnnnnnnnnnnnnnnnnnnnnnnnnnnnnnnnnnnnnnnnnnnnnnnnnnnnnnnnnnnnnnnnnnnnnnnnnnnnnnnnnnnnnnnnnnnnnnnnnnnnnnnnnnnnnnnnnnnnnnnnnnnnnnnnnnnnnnnnnnnnnnnnnnnnnnnnnnnnnnnnnnnnnnnnnnnnnnnnnnnnnnnnnnnnnnnnnnnnnnnnnnnnnnnnnnnnnnnnnnnnnnnnnnnnnnnnnnnnnnnnnnnnnnnnnnnnnnnnnnnnnnnnnnnnnnnnnnnnnnnnnnnnnnnnnnnnnnnnnnnnnnnnnnnnnnnnnnnnnnnnnnnnnnnnnnnnnnnnnnnnnnnnnnnnnnnnnnnnnnnnnnnnnnnnnnnnnnnnnnnnnnnnnnnnnnnnnnnnnnnnnnnnnnnnnnnnnnnnnnnnnnnnnnnnnnnnnnnnnnnnnnnnnnnnnnnnnnnnnnnnnnnnnnnnnnnnnnnnnnnnnnnnnnnnnnnnnnnnnnnnnnnnnnnnnnnnnnnnnnnnnnnnnnnnnnnnnnnnnnnnnnnnnnnnnnnnnnnnnnnnnnnnnnnnnnnnnnnnnnnnnnnnnnnnnnnnnnnnnnnnnnnnnnnnnnnnnnnnnnnnnnnnnnnnnnnnnnnnnnnnnnnnnnnnnnnnnnnnnnnnnnnnnnnnnnnnnnnnnnnnnnnnnnnnnnnnnnnnnnnnnnnnnnnnnnnnnnnnnnnnnnnnnnnnnnnnnnnnnnnnnnnnnnnnnnnnnnnnnnnnnnnnnnnnnnnnnnnnnnnnnnnnnnnnnnnnnnnnnnnnnnnnnnnnnnnnnnnnnnnnnnnnnnnnnnnnnnnnnnnnnnnnnnnnnnnnnnnnnnnnnnnnnnnnnnnnnnnnnnnnnnnnnnnnnnnnnnnnnnnnnnnnnnnnnnnnnnnnnnnnnnnnnnnnnnnnnnnnnnnnnnnnnnnnnnnnnnnnnnnnnnnnnnnnnnnnnnnnnnnnnnnnnnnnnnnnnnnnnnnnnnnnnnnnnnnnnnnnnnnnnnnnnnnnnnnnnnnnnnnnnnnnnnnnnnnnnnnnnnnnnnnnnnnnnnnnnnnnnnnnnnnnnnnnnnnnnnnnnnnnnnnnnnnnnnnnnnnnnnnnnnnnnnnnnnnnnnnnnnnnnnnnnnnnnnnnnnnnnnnnnnnnnnnnnnnnnnnnnnnnnnnnnnnnnnnnnnnnnnnnnnnnnnnnnnnnnnnnnnnnnnnnnnnnnnnnnnnnnnnnnnnnnnnnnnnnnnnnnnnnnnnnnnnnnnnnnnnnnnnnnnnnnnnnnnnnnnnnnnnnnnnnnnnnnnnnnnnnnnnnnnnnnnnnnnnnnnnnnnnnnnnnnnnnnnnnnnnnnnnnnnnnnnnnnnnnnnnnnnnnnnnnnnnnnnnnnnnnnnnnnnnnnnnnnnnnnnnnnnnnnnnnnnnnnnnnnnnnnnnnnnnnnnnnnnnnnnnnnnnnnnnnnnnnnnnnnnnnnnnnnnnnnnnnnnnnnnnnnnnnnnnnnnnnnnnnnnnnnnnnnnnnnnnnnnnnnnnnnnnnnnnnnnnnnnnnnnnnnnnnnnnnnnnnnnnnnnnnnnnnnnnnnnnnnnnnnnnnnnnnnnnnnnnnnnnnnnnnnnnnnnnnnnnnnnnnnnnnnnnnnnnnnnnnnnnnnnnnnnnnnnnnnnnnnnnnnnnnnnnnnnnnnnnnnnnnnnnnnnnnnnnnnnnnnnnnnnnnnnnnnnnnnnnnnnnnnnnnnnnnnnnnnnnnnnnnnnnnnnnnnnnnnnnnnnnnnnnnnnnnnnnnnnnnnnnnnnnnnnnnnnnnnnnnnnnnnnnnnnnnnnnnnnnnnnnnnnnnnnnnnnnnnnnnnnnnnnnnnnnnnnnnnnnnnnnnnnnnnnnnnnnnnnnnnnnnnnnnnnnnnnnnnnnnnnnnnnnnnnnnnnnnnnnnnnnnnnnnnnnnnnnnnnnnnnnnnnnnnnnnnnnnnnnnnnnnnnnnnnnnnnnnnnnnnnnnnnnnnnnnnnnnnnnnnnnnnnnnnnnnnnnnnnnnnnnnnnnnnnnnnnnnnnnnnnnnnnnnnnnnnnnnnnnnnnnnnnnnnnnnnnnnnnnnnnnnnnnnnnnnnnnnnnnnnnnnnnnnnnnnnnnnnnnnnnnnnnnnnnnnnnnnnnnnnnnnnnnnnnnnnnnnnnnnnnnnnnnnnnnnnnnnnnnnnnnnnnnnnnnnnnnnnnnnnnnnnnnnnnnnnnnnnnnnnnnnnnnnnnnnnnnnnnnnnnnnnnnnnnnnnnnnnnnnnnnnnnnnnnnnnnnnnnnnnnnnnnnnnnnnnnnnnnnnnnnnnnnnnnnnnnnnnnnnnnnnnnnnnnnnnnnnnnnnnnnnnnnnnnnnnnnnnnnnnnnnnnnnnnnnnnnnnnnnnnnnnnnnnnnnnnnnnnnnnnnnnnnnnnnnnnnnnnnnnnnnnnnnnnnnnnnnnnnnnnnnnnnnnnnnnnnnnnnnnnnnnnnnnnnnnnnnnnnnnnnnnnnnnnnnnnnnnnnnnnnnnnnnnnnnnnnnnnnnnnnnnnnnnnnnnnnnnnnnnnnnnnnnnnnnnnnnnnnnnnnnnnnnnnnnnnnnnnnnnnnnnnnnnnnnnnnnnnnnnnnnnnnnnnnnnnnnnnnnnnnnnnnnnnnnnnnnnnnnnnnnnnnnnnnnnnnnnnnnnnnnnnnnnnnnnnnnnnnnnnnnnnnnnnnnnnnnnnnnnnnnnnnnnnnnnnnnnnnnnnnnnnnnnnnnnnnnnnnnnnnnnnnnnnnnnnnnnnnnnnnnnnnnnnnnnnnnnnnnnnnnnnnnnnnnnnnnnnnnnnnnnnnnnnnnnnnnnnnnnnnnnnnnnnnnnnnnnnnnnnnnnnnnnnnnnnnnnnnnnnnnnnnnnnnnnnnnnnnnnnnnnnnnnnnnnnnnnnnnnnnnnnnnnnnnnnnnnnnnnnnnnnnnnnnnnnnnnnnnnnnnnnnnnnnnnnnnnnnnnnnnnnnnnnnnnnnnnnnnnnnnnnnnnnnnnnnnnnnnnnnnnnnnnnnnnnnnnnnnnnnnnnnnnnnnnnnnnnnnnnnnnnnnnnnnnnnnnnnnnnnnnnnnnnnnnnnnnnnnnnnnnnnnnnnnnnnnnnnnnnnnnnnnnnnnnnnnnnnnnnnnnnnnnnnnnnnnnnnnnnnnnnnnnnnnnnnnnnnnnnnnnnnnnnnnnnnnnnnnnnnnnnnnnnnnnnnnnnnnnnnnnnnnnnnnnnnnnnnnnnnnnnnnnnnnnnnnnnnnnnnnnnnnnnnnnnnnnnnnnnnnnnnnnnnnnnnnnnnnnnnnnnnnnnnnnnnnnnnnnnnnnnnnnnnnnnnnnnnnnnnnnnnnnnnnnnnnnnnnnnnnnnnnnnnnnnnnnnnnnnnnnnnnnnnnnnnnnnnnnnnnnnnnnnnnnnnnnnnnnnnnnnnnnnnnnnnnnnnnnnnnnnnnnnnnnnnnnnnnnnnnnnnnnnnnnnnnnnnnnnnnnnnnnnnnnnnnnnnnnnnnnnnnnnnnnnnnnnnnnnnnnnnnnnnnnnnnnnnnnnnnnnnnnnnnnnnnnnnnnnnnnnnnnnnnnnnnnnnnnnnnnnnnnnnnnnnnnnnnnnnnnnnnnnnnnnnnnnnnnnnnnnnnnnnnnnnnnnnnnnnnnnnnnnnnnnnnnnnnnnnnnnnnnnnnnnnnnnnnnnnnnnnnnnnnnnnnnnnnnnnnnnnnnnnnnnnnnnnnnnnnnnnnnnnnnnnnnnnnnnnnnnnnnnnnnnnnnnnnnnnnnnnnnnnnnnnnnnnnnnnnnnnnnnnnnnnnnnnnnnnnnnnnnnnnnnnnnnnnnnnnnnnnnnnnnnnnnnnnnnnnnnnnnnnnnnnnnnnnnnnnnnnnnnnnnnnnnnnnnnnnnnnnnnnnnnnnnnnnnnnnnnnnnnnnnnnnnnnnnnnnnnnnnnnnnnnnnnnnnnnnnnnnnnnnnnnnnnnnnnnnnnnnnnnnnnnnnnnnnnnnnnnnnnnnnnnnnnnnnnnnnnnnnnnnnnnnnnnnnnnnnnnnnnnnnnnnnnnnnnnnnnnnnnnnnnnnnnnnnnnnnnnnnnnnnnnnnnnnnnnnnnnnnnnnnnnnnnnnnnnnnnnnnnnnnnnnnnnnnnnnnnnnnnnnnnnnnnnnnnnnnnnnnnnnnnnnnnnnnnnnnnnnnnnnnnnnnnnnnnnnnnnnnnnnnnnnnnnnnnnnnnnnnnnnnnnnnnnnnnnnnnnnnnnnnnnnnnnnnnnnnnnnnnnnnnnnnnnnnnnnnnnnnnnnnnnnnnnnnnnnnnnnnnnnnnnnnnnnnnnnnnnnnnnnnnnnnnnnnnnnnnnnnnnnnnnnnnnnnnnnnnnnnnnnnnnnnnnnnnnnnnnnnnnnnnnnnnnnnnnnnnnnnnnnnnnnnnnnnnnnnnnnnnnnnnnnnnnnnnnnnnnnnnnnnnnnnnnnnnnnnnnnnnnnnnnnnnnnnnnnnnnnnnnnnnnnnnnnnnnnnnnnnnnnnnnnnnnnnnnnnnnnnnnnnnnnnnnnnnnnnnnnnnnnnnnnnnnnnnnnnnnnnnnnnnnnnnnnnnnnnnnnnnnnnnnnnnnnnnnnnnnnnnnnnnnnnnnnnnnnnnnnnnnnnnnnnnnnnnnnnnnnnnnnnnnnnnnnnnnnnnnnnnnnnnnnnnnnnnnnnnnnnnnnnnnnnnnnnnnnnnnnnnnnnnnnnnnnnnnnnnnnnnnnnnnnnnnnnnnnnnnnnnnnnnnnnnnnnnnnnnnnnnnnnnnnnnnnnnnnnnnnnnnnnnnnnnnnnnnnnnnnnnnnnnnnnnnnnnnnnnnnnnnnnnnnnnnnnnnnnnnnnnnnnnnnnnnnnnnnnnnnnnnnnnnnnnnnnnnnnnnnnnnnnnnnnnnnnnnnnnnnnnnnnnnnnnnnnnnnnnnnnnnnnnnnnnnnnnnnnnnnnnnnnnnnnnnnnnnnnnnnnnnnnnnnnnnnnnnnnnnnnnnnnnnnnnnnnnnnnnnnnnnnnnnnnnnnnnnnnnnnnnnnnnnnnnnnnnnnnnnnnnnnnnnnnnnnnnnnnnnnnnnnnnnnnnnnnnnnnnnnnnnnnnnnnnnnnnnnnnnnnnnnnnnnnnnnnnnnnnnnnnnnnnnnnnnnnnnnnnnnnnnnnnnnnnnnnnnnnnnnnnnnnnnnnnnnnnnnnnnnnnnnnnnnnnnnnnnnnnnnnnnnnnnnnnnnnnnnnnnnnnnnnnnnnnnnnnnnnnnnnnnnnnnnnnnnnnnnnnnnnnnnnnnnnnnnnnnnnnnnnnnnnnnnnnnnnnnnnnnnnnnnnnnnnnnnnnnnnnnnnnnnnnnnnnnnnnnnnnnnnnnnnnnnnnnnnnnnnnnnnnnnnnnnnnnnnnnnnnnnnnnnnnnnnnnnnnnnnnnnnnnnnnnnnnnnnnnnnnnnnnnnnnnnnnnnnnnnnnnnnnnnnnnnnnnnnnnnnnnnnnnnnnnnnnnnnnnnnnnnnnnnnnnnnnnnnnnnnnnnnnnnnnnnnnnnnnnnnnnnnnnnnnnnnnnnnnnnnnnnnnnnnnnnnnnnnnnnnnnnnnnnnnnnnnnnnnnnnnnnnnnnnnnnnnnnnnnnnnnnnnnnnnnnnnnnnnnnnnnnnnnnnnnnnnnnnnnnnnnnnnnnnnnnnnnnnnnnnnnnnnnnnnnnnnnnnnnnnnnnnnnnnnnnnnnnnnnnnnnnnnnnnnnnnnnnnnnnnnnnnnnnnnnnnnnnnnnnnnnnnnnnnnnnnnnnnnnnnnnnnnnnnnnnnnnnnnnnnnnnnnnnnnnnnnnnnnnnnnnnnnnnnnnnnnnnnnnnnnnnnnnnnnnnnnnnnnnnnnnnnnnnnnnnnnnnnnnnnnnnnnnnnnnnnnnnnnnnnnnnnnnnnnnnnnnnnnnnnnnnnnnnnnnnnnnnnnnnnnnnnnnnnnnnnnnnnnnnnnnnnnnnnnnnnnnnnnnnnnnnnnnnnnnnnnnnnnnnnnnnnnnnnnnnnnnnnnnnnnnnnnnnnnnnnnnnnnnnnnnnnnnnnnnnnnnnnnnnnnnnnnnnnnnnnnnnnnnnnnnnnnnnnnnnnnnnnnnnnnnnnnnnnnnnnnnnnnnnnnnnnnnnnnnnnnnnnnnnnnnnnnnnnnnnnnnnnnnnnnnnnnnnnnnnnnnnnnnnnnnnnnnnnnnnnnnnnnnnnnnnnnnnnnnnnnnnnnnnnnnnnnnnnnnnnnnnnnnnnnnnnnnnnnnnnnnnnnnnnnnnnnnnnnnnnnnnnnnnnnnnnnnnnnnnnnnnnnnnnnnnnnnnnnnnnnnnnnnnnnnnnnnnnnnnnnnnnnnnnnnnnnnnnnnnnnnnnnnnnnnnnnnnnnnnnnnnnnnnnnnnnnnnnnnnnnnnnnnnnnnnnnnnnnnnnnnnnnnnnnnnnnnnnnnnnnnnnnnnnnnnnnnnnnnnnnnnnnnnnnnnnnnnnnnnnnnnnnnnnnnnnnnnnnnnnnnnnnnnnnnnnnnnnnnnnnnnnnnnnnnnnnnnnnnnnnnnnnnnnnnnnnnnnnnnnnnnnnnnnnnnnnnnnnnnnnnnnnnnnnnnnnnnnnnnnnnnnnnnnnnnnnnnnnnnnnnnnnnnnnnnnnnnnnnnnnnnnnnnnnnnnnnnnnnnnnnnnnnnnnnnnnnnnnnnnnnnnnnnnnnnnnnnnnnnnnnnnnnnnnnnnnnnnnnnnnnnnnnnnnnnnnnnnnnnnnnnnnnnnnnnnnnnnnnnnnnnnnnnnnnnnnnnnnnnnnnnnnnnnnnnnnnnnnnnnnnnnnnnnnnnnnnnnnnnnnnnnnnnnnnnnnnnnnnnnnnnnnnnnnnnnnnnnnnnnnnnnnnnnnnnnnnnnnnnnnnnnnnnnnnnnnnnnnnnnnnnnnnnnnnnnnnnnnnnnnnnnnnnnnnnnnnnnnnnnnnnnnnnnnnnnnnnnnnnnnnnnnnnnnnnnnnnnnnnnnnnnnnnnnnnnnnnnnnnnnnnnnnnnnnnnnnnnnnnnnnnnnnnnnnnnnnnnnnnnnnnnnnnnnnnnnnnnnnnnnnnnnnnnnnnnnnnnnnnnnnnnnnnnnnnnnnnnnnnnnnnnnnnnnnnnnnnnnnnnnnnnnnnnnnnnnnnnnnnnnnnnnnnnnnnnnnnnnnnnnnnnnnnnnnnnnnnnnnnnnnnnnnnnnnnnnnnnnnnnnnnnnnnnnnnnnnnnnnnnnnnnnnnnnnnnnnnnnnnnnnnnnnnnnnnnnnnnnnnnnnnnnnnnnnnnnnnnnnnnnnnnnnnnnnnnnnnnnnnnnnnnnnnnnnnnnnnnnnnnnnnnnnnnnnnnnnnnnnnnnnnnnnnnnnnnnnnnnnnnnnnnnnnnnnnnnnnnnnnnnnnnnnnnnnnnnnnnnnnnnnnnnnnnnnnnnnnnnnnnnnnnnnnnnnnnnnnnnnnnnnnnnnnnnnnnnnnnnnnnnnnnnnnnnnnnnnnnnnnnnnnnnnnnnnnnnnnnnnnnnnnnnnnnnnnnnnnnnnnnnnnnnnnnnnnnnnnnnnnnnnnnnnnnnnnnnnnnnnnnnnnnnnnnnnnnnnnnnnnnnnnnnnnnnnnnnnnnnnnnnnnnnnnnnnnnnnnnnnnnnnnnnnnnnnnnnnnnnnnnnnnnnnnnnnnnnnnnnnnnnnnnnnnnnnnnnnnnnnnnnnnnnnnnnnnnnnnnnnnnnnnnnnnnnnnnnnnnnnnnnnnnnnnnnnnnnnnnnnnnnnnnnnnnnnnnnnnnnnnnnnnnnnnnnnnnnnnnnnnnnnnnnnnnnnnnnnnnnnnnnnnnnnnnnnnnnnnnnnnnnnnnnnnnnnnnnnnnnnnnnnnnnnnnnnnnnnnnnnnnnnnnnnnnnnnnnnnnnnnnnnnnnnnnnnnnnnnnnnnnnnnnnnnnnnnnnnnnnnnnnnnnnnnnnnnnnnnnnnnnnnnnnnnnnnnnnnnnnnnnnnnnnnnnnnnnnnnnnnnnnnnnnnnnnnnnnnnnnnnnnnnnnnnnnnnnnnnnnnnnnnnnnnnnnnnnnnnnnnnnnnnnnnnnnnnnnnnnnnnnnnnnnnnnnnnnnnnnnnnnnnnnnnnnnnnnnnnnnnnnnnnnnnnnnnnnnnnnnnnnnnnnnnnnnnnnnnnnnnnnnnnnnnnnnnnnnnnnnnnnnnnnnnnnnnnnnnnnnnnnnnnnnnnnnnnnnnnnnnnnnnnnnnnnnnnnnnnnnnnnnnnnnnnnnnnnnnnnnnnnnnnnnnnnnnnnnnnnnnnnnnnnnnnnnnnnnnnnnnnnnnnnnnnnnnnnnnnnnnnnnnnnnnnnnnnnnnnnnnnnnnnnnnnnnnnnnnnnnnnnnnnnnnnnnnnnnnnnnnnnnnnnnnnnnnnnnnnnnnnnnnnnnnnnnnnnnnnnnnnnnnnnnnnnnnnnnnnnnnnnnnnnnnnnnnnnnnnnnnnnnnnnnnnnnnnnnnnnnnnnnnnnnnnnnnnnnnnnnnnnnnnnnnnnnnnnnnnnnnnnnnnnnnnnnnnnnnnnnnnnnnnnnnnnnnnnnnnnnnnnnnnnnnnnnnnnnnnnnnnnnnnnnnnnnnnnnnnnnnnnnnnnnnnnnnnnnnnnnnnnnnnnnnnnnnnnnnnnnnnnnnnnnnnnnnnnnnnnnnnnnnnnnnnnnnnnnnnnnnnnnnnnnnnnnnnnnnnnnnnnnnnnnnnnnnnnnnnnnnnnnnnnnnnnnnnnnnnnnnnnnnnnnnnnnnnnnnnnnnnnnnnnnnnnnnnnnnnnnnnnnnnnnnnnnnnnnnnnnnnnnnnnnnnnnnnnnnnnnnnnnnnnnnnnnnnnnnnnnnnnnnnnnnnnnnnnnnnnnnnnnnnnnnnnnnnnnnnnnnnnnnnnnnnnnnnnnnnnnnnnnnnnnnnnnnnnnnnnnnnnnnnnnnnnnnnnnnnnnnnnnnnnnnnnnnnnnnnnnnnnnnnnnnnnnnnnnnnnnnnnnnnnnnnnnnnnnnnnnnnnnnnnnnnnnnnnnnnnnnnnnnnnnnnnnnnnnnnnnnnnnnnnnnnnnnnnnnnnnnnnnnnnnnnnnnnnnnnnnnnnnnnnnnnnnnnnnnnnnnnnnnnnnnnnnnnnnnnnnnnnnnnnnnnnnnnnnnnnnnnnnnnnnnnnnnnnnnnnnnnnnnnnnnnnnnnnnnnnnnnnnnnnnnnnnnnnnnnnnnnnnnnnnnnnnnnnnnnnnnnnnnnnnnnnnnnnnnnnnnnnnnnnnnnnnnnnnnnnnnnnnnnnnnnnnnnnnnnnnnnnnnnnnnnnnnnnnnnnnnnnnnnnnnnnnnnnnnnnnnnnnnnnnnnnnnnnnnnnnnnnnnnnnnnnnnnnnnnnnnnnnnnnnnnnnnnnnnnnnnnnnnnnnnnnnnnnnnnnnnnnnnnnnnnnnnnnnnnnnnnnnnnnnnnnnnnnnnnnnnnnnnnnnnnnnnnnnnnnnnnnnnnnnnnnnnnnnnnnnnnnnnnnnnnnnnnnnnnnnnnnnnnnnnnnnnnnnnnnnnnnnnnnnnnnnnnnnnnnnnnnnnnnnnnnnnnnnnnnnnnnnnnnnnnnnnnnnnnnnnnnnnnnnnnnnnnnnnnnnnnnnnnnnnnnnnnnnnnnnnnnnnnnnnnnnnnnnnnnnnnnnnnnnnnnnnnnnnnnnnnnnnnnnnnnnnnnnnnnnnnnnnnnnnnnnnnnnnnnnnnnnnnnnnnnnnnnnnnnnnnnnnnnnnnnnnnnnnnnnnnnnnnnnnnnnnnnnnnnnnnnnnnnnnnnnnnnnnnnnnnnnnnnnnnnnnnnnnnnnnnnnnnnnnnnnnnnnnnnnnnnnnnnnnnnnnnnnnnnnnnnnnnnnnnnnnnnnnnnnnnnnnnnnnnnnnnnnnnnnnnnnnnnnnnnnnnnnnnnnnnnnnnnnnnnnnnnnnnnnnnnnnnnnnnnnnnnnnnnnnnnnnnnnnnnnnnnnnnnnnnnnnnnnnnnnnnnnnnnnnnnnnnnnnnnnnnnnnnnnnnnnnnnnnnnnnnnnnnnnnnnnnnnnnnnnnnnnnnnnnnnnnnnnnnnnnnnnnnnnnnnnnnnnnnnnnnnnnnnnnnnnnnnnnnnnnnnnnnnnnnnnnnnnnnnnnnnnnnnnnnnnnnnnnnnnnnnnnnnnnnnnnnnnnnnnnnnnnnnnnnnnnnnnnnnnnnnnnnnnnnnnnnnnnnnnnnnnnnnnnnnnnnnnnnnnnnnnnnnnnnnnnnnnnnnnnnnnnnnnnnnnnnnnnnnnnnnnnnnnnnnnnnnnnnnnnnnnnnnnnnnnnnnnnnnnnnnnnnnnnnnnnnnnnnnnnnnnnnnnnnnnnnnnnnnnnnnnnnnnnnnnnnnnnnnnnnnnnnnnnnnnnnnnnnnnnnnnnnnnnnnnnnnnnnnnnnnnnnnnnnnnnnnnnnnnnnnnnnnnnnnnnnnnnnnnnnnnnnnnnnnnnnnnnnnnnnnnnnnnnnnnnnnnnnnnnnnnnnnnnnnnnnnnnnnnnnnnnnnnnnnnnnnnnnnnnnnnnnnnnnnnnnnnnnnnnnnnnnnnnnnnnnnnnnnnnnnnnnnnnnnnnnnnnnnnnnnnnnnnnnnnnnnnnnnnnnnnnnnnnnnnnnnnnnnnnnnnnnnnnnnnnnnnnnnnnnnnnnnnnnnnnnnnnnnnnnnnnnnnnnnnnnnnnnnnnnnnnnnnnnnnnnnnnnnnnnnnnnnnnnnnnnnnnnnnnnnnnnnnnnnnnnnnnnnnnnnnnnnnnnnnnnnnnnnnnnnnnnnnnnnnnnnnnnnnnnnnnnnnnnnnnnnnnnnnnnnnnnnnnnnnnnnnnnnnnnnnnnnnnnnnnnnnnnnnnnnnnnnnnnnnnnnnnnnnnnnnnnnnnnnnnnnnnnnnnnnnnnnnnnnnnnnnnnnnnnnnnnnnnnnnnnnnnnnnnnnnnnnnnnnnnnnnnnnnnnnnnnnnnnnnnnnnnnnnnnnnnnnnnnnnnnnnnnnnnnnnnnnnnnnnnnnnnnnnnnnnnnnnnnnnnnnnnnnnnnnnnnnnnnnnnnnnnnnnnnnnnnnnnnnnnnnnnnnnnnnnnnnnnnnnnnnnnnnnnnnnnnnnnnnnnnnnnnnnnnnnnnnnnnnnnnnnnnnnnnnnnnnnnnnnnnnnnnnnnnnnnnnnnnnnnnnnnnnnnnnnnnnnnnnnnnnnnnnnnnnnnnnnnnnnnnnnnnnnnnnnnnnnnnnnnnnnnnnnnnnnnnnnnnnnnnnnnnnnnnnnnnnnnnnnnnnnnnnnnnnnnnnnnnnnnnnnnnnnnnnnnnnnnnnnnnnnnnnnnnnnnnnnnnnnnnnnnnnnnnnnnnnnnnnnnnnnnnnnnnnnnnnnnnnnnnnnnnnnnnnnnnnnnnnnnnnnnnnnnnnnnnnnnnnnnnnnnnnnnnnnnnnnnnnnnnnnnnnnnnnnnnnnnnnnnnnnnnnnnnnnnnnnnnnnnnnnnnnnnnnnnnnnnnnnnnnnnnnnnnnnnnnnnnnnnnnnnnnnnnnnnnnnnnnnnnnnnnnnnnnnnnnnnnnnnnnnnnnnnnnnnnnnnnnnnnnnnnnnnnnnnnnnnnnnnnnnnnnnnnnnnnnnnnnnnnnnnnnnnnnnnnnnnnnnnnnnnnnnnnnnnnnnnnnnnnnnnnnnnnnnnnnnnnnnnnnnnnnnnnnnnnnnnnnnnnnnnnnnnnnnnnnnnnnnnnnnnnnnnnnnnnnnnnnnnnnnnnnnnnnnnnnnnnnnnnnnnnnnnnnnnnnnnnnnnnnnnnnnnnnnnnnnnnnnnnnnnnnnnnnnnnnnnnnnnnnnnnnnnnnnnnnnnnnnnnnnnnnnnnnnnnnnnnnnnnnnnnnnnnnnnnnnnnnnnnnnnnnnnnnnnnnnnnnnnnnnnnnnnnnnnnnnnnnnnnnnnnnnnnnnnnnnnnnnnnnnnnnnnnnnnnnnnnnnnnnnnnnnnnnnnnnnnnnnnnnnnnnnnnnnnnnnnnnnnnnnnnnnnnnnnnnnnnnnnnnnnnnnnnnnnnnnnnnnnnnnnnnnnnnnnnnnnnnnnnnnnnnnnnnnnnnnnnnnnnnnnnnnnnnnnnnnnnnnnnnnnnnnnnnnnnnnnnnnnnnnnnnnnnnnnnnnnnnnnnnnnnnnnnnnnnnnnnnnnnnnnnnnnnnnnnnnnnnnnnnnnnnnnnnnnnnnnnnnnnnnnnnnnnnnnnnnnnnnnnnnnnnnnnnnnnnnnnnnnnnnnnnnnnnnnnnnnnnnnnnnnnnnnnnnnnnnnnnnnnnnnnnnnnnnnnnnnnnnnnnnnnnnnnnnnnnnnnnnnnnnnnnnnnnnnnnnnnnnnnnnnnnnnnnnnnnnnnnnnnnnnnnnnnnnnnnnnnnnnnnnnnnnnnnnnnnnnnnnnnnnnnnnnnnnnnnnnnnnnnnnnnnnnnnnnnnnnnnnnnnnnnnnnnnnnnnnnnnnnnnnnnnnnnnnnnnnnnnnnnnnnnnnnnnnnnnnnnnnnnnnnnnnnnnnnnnnnnnnnnnnnnnnnnnnnnnnnnnnnnnnnnnnnnnnnnnnnnnnnnnnnnnnnnnnnnnnnnnnnnnnnnnnnnnnnnnnnnnnnnnnnnnnnnnnnnnnnnnnnnnnnnnnnnnnnnnnnnnnnnnnnnnnnnnnnnnnnnnnnnnnnnnnnnnnnnnnnnnnnnnnnnnnnnnnnnnnnnnnnnnnnnnnnnnnnnnnnnnnnnnnnnnnnnnnnnnnnnnnnnnnnnnnnnnnnnnnnnnnnnnnnnnnnnnnnnnnnnnnnnnnnnnnnnnnnnnnnnnnnnnnnnnnnnnnnnnnnnnnnnnnnnnnnnnnnnnnnnnnnnnnnnnnnnnnnnnnnnnnnnnnnnnnnnnnnnnnnnnnnnnnnnnnnnnnnnnnnnnnnnnnnnnnnnnnnnnnnnnnnnnnnnnnnnnnnnnnnnnnnnnnnnnnnnnnnnnnnnnnnnnnnnnnnnnnnnnnnnnnnnnnnnnnnnnnnnnnnnnnnnnnnnnnnnnnnnnnnnnnnnnnnnnnnnnnnnnnnnnnnnnnnnnnnnnnnnnnnnnnnnnnnnnnnnnnnnnnnnnnnnnnnnnnnnnnnnnnnnnnnnnnnnnnnnnnnnnnnnnnnnnnnnnnnnnnnnnnnnnnnnnnnnnnnnnnnnnnnnnnnnnnnnnnnnnnnnnnnnnnnnnnnnnnnnnnnnnnnnnnnnnnnnnnnnnnnnnnnnnnnnnnnnnnnnnnnnnnnnnnnnnnnnnnnnnnnnnnnnnnnnnnnnnnnnnnnnnnnnnnnnnnnnnnnnnnnnnnnnnnnnnnnnnnnnnnnnnnnnnnnnnnnnnnnnnnnnnnnnnnnnnnnnnnnnnnnnnnnnnnnnnnnnnnnnnnnnnnnnnnnnnnnnnnnnnnnnnnnnnnnnnnnnnnnnnnnnnnnnnnnnnnnnnnnnnnnnnnnnnnnnnnnnnnnnnnnnnnnnnnnnnnnnnnnnnnnnnnnnnnnnnnnnnnnnnnnnnnnnnnnnnnnnnnnnnnnnnnnnnnnnnnnnnnnnnnnnnnnnnnnnnnnnnnnnnnnnnnnnnnnnnnnnnnnnnnnnnnnnnnnnnnnnnnnnnnnnnnnnnnnnnnnnnnnnnnnnnnnnnnnnnnnnnnnnnnnnnnnnnnnnnnnnnnnnnnnnnnnnnnnnnnnnnnnnnnnnnnnnnnnnnnnnnnnnnnnnnnnnnnnnnnnnnnnnnnnnnnnnnnnnnnnnnnnnnnnnnnnnnnnnnnnnnnnnnnnnnnnnnnnnnnnnnnnnnnnnnnnnnnnnnnnnnnnnnnnnnnnnnnnnnnnnnnnnnnnnnnnnnnnnnnnnnnnnnnnnnnnnnnnnnnnnnnnnnnnnnnnnnnnnnnnnnnnnnnnnnnnnnnnnnnnnnnnnnnnnnnnnnnnnnnnnnnnnnnnnnnnnnnnnnnnnnnnnnnnnnnnnnnnnnnnnnnnnnnnnnnnnnnnnnnnnnnnnnnnnnnnnnnnnnnnnnnnnnnnnnnnnnnnnnnnnnnnnnnnnnnnnnnnnnnnnnnnnnnnnnnnnnnnnnnnnnnnnnnnnnnnnnnnnnnnnnnnnnnnnnnnnnnnnnnnnnnnnnnnnnnnnnnnnnnnnnnnnnnnnnnnnnnnnnnnnnnnnnnnnnnnnnnnnnnnnnnnnnnnnnnnnnnnnnnnnnnnnnnnnnnnnnnnnnnnnnnnnnnnnnnnnnnnnnnnnnnnnnnnnnnnnnnnnnnnnnnnnnnnnnnnnnnnnnnnnnnnnnnnnnnnnnnnnnnnnnnnnnnnnnnnnnnnnnnnnnnnnnnnnnnnnnnnnnnnnnnnnnnnnnnnnnnnnnnnnnnnnnnnnnnnnnnnnnnnnnnnnnnnnnnnnnnnnnnnnnnnnnnnnnnnnnnnnnnnnnnnnnnnnnnnnnnnnnnnnnnnnnnnnnnnnnnnnnnnnnnnnnnnnnnnnnnnnnnnnnnnnnnnnnnnnnnnnnnnnnnnnnnnnnnnnnnnnnnnnnnnnnnnnnnnnnnnnnnnnnnnnnnnnnnnnnnnnnnnnnnnnnnnnnnnnnnnnnnnnnnnnnnnnnnnnnnnnnnnnnnnnnnnnnnnnnnnnnnnnnnnnnnnnnnnnnnnnnnnnnnnnnnnnnnnnnnnnnnnnnnnnnnnnnnnnnnnnnnnnnnnnnnnnnnnnnnnnnnnnnnnnnnnnnnnnnnnnnnnnnnnnnnnnnnnnnnnnnnnnnnnnnnnnnnnnnnnnnnnnnnnnnnnnnnnnnnnnnnnnnnnnnnnnnnnnnnnnnnnnnnnnnnnnnnnnnnnnnnnnnnnnnnnnnnnnnnnnnnnnnnnnnnnnnnnnnnnnnnnnnnnnnnnnnnnnnnnnnnnnnnnnnnnnnnnnnnnnnnnnnnnnnnnnnnnnnnnnnnnnnnnnnnnnnnnnnnnnnnnnnnnnnnnnnnnnnnnnnnnnnnnnnnnnnnnnnnnnnnnnnnnnnnnnnnnnnnnnnnnnnnnnnnnnnnnnnnnnnnnnnnnnnnnnnnnnnnnnnnnnnnnnnnnnnnnnnnnnnnnnnnnnnnnnnnnnnnnnnnnnnnnnnnnnnnnnnnnnnnnnnnnnnnnnnnnnnnnnnnnnnnnnnnnnnnnnnnnnnnnnnnnnnnnnnnnnnnnnnnnnnnnnnnnnnnnnnnnnnnnnnnnnnnnnnnnnnnnnnnnnnnnnnnnnnnnnnnnnnnnnnnnnnnnnnnnnnnnnnnnnnnnnnnnnnnnnnnnnnnnnnnnnnnnnnnnnnnnnnnnnnnnnnnnnnnnnnnnnnnnnnnnnnnnnnnnnnnnnnnnnnnnnnnnnnnnnnnnnnnnnnnnnnnnnnnnnnnnnnnnnnnnnnnnnnnnnnnnnnnnnnnnnnnnnnnnnnnnnnnnnnnnnnnnnnnnnnnnnnnnnnnnnnnnnnnnnnnnnnnnnnnnnnnnnnnnnnnnnnnnnnnnnnnnnnnnnnnnnnnnnnnnnnnnnnnnnnnnnnnnnnnnnnnnnnnnnnnnnnnnnnnnnnnnnnnnnnnnnnnnnnnnnnnnnnnnnnnnnnnnnnnnnnnnnnnnnnnnnnnnnnnnnnnnnnnnnnnnnnnnnnnnnnnnnnnnnnnnnnnnnnnnnnnnnnnnnnnnnnnnnnnnnnnnnnnnnnnnnnnnnnnnnnnnnnnnnnnnnnnnnnnnnnnnnnnnnnnnnnnnnnnnnnnnnnnnnnnnnnnnnnnnnnnnnnnnnnnnnnnnnnnnnnnnnnnnnnnnnnnnnnnnnnnnnnnnnnnnnnnnnnnnnnnnnnnnnnnnnnnnnnnnnnnnnnnnnnnnnnnnnnnnnnnnnnnnnnnnnnnnnnnnnnnnnnnnnnnnnnnnnnnnnnnnnnnnnnnnnnnnnnnnnnnnnnnnnnnnnnnnnnnnnnnnnnnnnnnnnnnnnnnnnnnnnnnnnnnnnnnnnnnnnnnnnnnnnnnnnnnnnnnnnnnnnnnnnnnnnnnnnnnnnnnnnnnnnnnnnnnnnnnnnnnnnnnnnnnnnnnnnnnnnnnnnnnnnnnnnnnnnnnnnnnnnnnnnnnnnnnnnnnnnnnnnnnnnnnnnnnnnnnnnnnnnnnnnnnnnnnnnnnnnnnnnnnnnnnnnnnnnnnnnnnnnnnnnnnnnnnnnnnnnnnnnnnnnnnnnnnnnnnnnnnnnnnnnnnnnnnnnnnnnnnnnnnnnnnnnnnnnnnnnnnnnnnnnnnnnnnnnnnnnnnnnnnnnnnnnnnnnnnnnnnnnnnnnnnnnnnnnnnnnnnnnnnnnnnnnnnnnnnnnnnnnnnnnnnnnnnnnnnnnnnnnnnnnnnnnnnnnnnnnnnnnnnnnnnnnnnnnnnnnnnnnnnnnnnnnnnnnnnnnnnnnnnnnnnnnnnnnnnnnnnnnnnnnnnnnnnnnnnnnnnnnnnnnnnnnnnnnnnnnnnnnnnnnnnnnnnnnnnnnnnnnnnnnnnnnnnnnnnnnnnnnnnnnnnnnnnnnnnnnnnnnnnnnnnnnnnnnnnnnnnnnnnnnnnnnnnnnnnnnnnnnnnnnnnnnnnnnnnnnnnnnnnnnnnnnnnnnnnnnnnnnnnnnnnnnnnnnnnnnnnnnnnnnnnnnnnnnnnnnnnnnnnnnnnnnnnnnnnnnnnnnnnnnnnnnnnnnnnnnnnnnnnnnnnnnnnnnnnnnnnnnnnnnnnnnnnnnnnnnnnnnnnnnnnnnnnnnnnnnnnnnnnnnnnnnnnnnnnnnnnnnnnnnnnnnnnnnnnnnnnnnnnnnnnnnnnnnnnnnnnnnnnnnnnnnnnnnnnnnnnnnnnnnnnnnnnnnnnnnnnnnnnnnnnnnnnnnnnnnnnnnnnnnnnnnnnnnnnnnnnnnnnnnnnnnnnnnnnnnnnnnnnnnnnnnnnnnnnnnnnnnnnnnnnnnnnnnnnnnnnnnnnnnnnnnnnnnnnnnnnnnnnnnnnnnnnnnnnnnnnnnnnnnnnnnnnnnnnnnnnnnnnnnnnnnnnnnnnnnnnnnnnnnnnnnnnnnnnnnnnnnnnnnnnnnnnnnnnnnnnnnnnnnnnnnnnnnnnnnnnnnnnnnnnnnnnnnnnnnnnnnnnnnnnnnnnnnnnnnnnnnnnnnnnnnnnnnnnnnnnnnnnnnnnnnnnnnnnnnnnnnnnnnnnnnnnnnnnnnnnnnnnnnnnnnnnnnnnnnnnnnnnnnnnnnnnnnnnnnnnnnnnnnnnnnnnnnnnnnnnnnnnnnnnnnnnnnnnnnnnnnnnnnnnnnnnnnnnnnnnnnnnnnnnnnnnnnnnnnnnnnnnnnnnnnnnnnnnnnnnnnnnnnnnnnnnnnnnnnnnnnnnnnnnnnnnnnnnnnnnnnnnnnnnnnnnnnnnnnnnnnnnnnnnnnnnnnnnnnnnnnnnnnnnnnnnnnnnnnnnnnnnnnnnnnnnnnnnnnnnnnnnnnnnnnnnnnnnnnnnnnnnnnnnnnnnnnnnnnnnnnnnnnnnnnnnnnnnnnnnnnnnnnnnnnnnnnnnnnnnnnnnnnnnnnnnnnnnnnnnnnnnnnnnnnnnnnnnnnnnnnnnnnnnnnnnnnnnnnnnnnnnnnnnnnnnnnnnnnnnnnnnnnnnnnnnnnnnnnnnnnnnnnnnnnnnnnnnnnnnnnnnnnnnnnnnnnnnnnnnnnnnnnnnnnnnnnnnnnnnnnnnnnnnnnnnnnnnnnnnnnnnnnnnnnnnnnnnnnnnnnnnnnnnnnnnnnnnnnnnnnnnnnnnnnnnnnnnnnnnnnnnnnnnnnnnnnnnnnnnnnnnnnnnnnnnnnnnnnnnnnnnnnnnnnnnnnnnnnnnnnnnnnnnnnnnnnnnnnnnnnnnnnnnnnnnnnnnnnnnnnnnnnnnnnnnnnnnnnnnnnnnnnnnnnnnnnnnnnnnnnnnnnnnnnnnnnnnnnnnnnnnnnnnnnnnnnnnnnnnnnnnnnnnnnnnnnnnnnnnnnnnnnnnnnnnnnnnnnnnnnnnnnnnnnnnnnnnnnnnnnnnnnnnnnnnnnnnnnnnnnnnnnnnnnnnnnnnnnnnnnnnnnnnnnnnnnnnnnnnnnnnnnnnnnnnnnnnnnnnnnnnnnnnnnnnnnnnnnnnnnnnnnnnnnnnnnnnnnnnnnnnnnnnnnnnnnnnnnnnnnnnnnnnnnnnnnnnnnnnnnnnnnnnnnnnnnnnnnnnnnnnnnnnnnnnnnnnnnnnnnnnnnnnnnnnnnnnnnnnnnnnnnnnnnnnnnnnnnnnnnnnnnnnnnnnnnnnnnnnnnnnnnnnnnnnnnnnnnnnnnnnnnnnnnnnnnnnnnnnnnnnnnnnnnnnnnnnnnnnnnnnnnnnnnnnnnnnnnnnnnnnnnnnnnnnnnnnnnnnnnnnnnnnnnnnnnnnnnnnnnnnnnnnnnnnnnnnnnnnnnnnnnnnnnnnnnnnnnnnnnnnnnnnnnnnnnnnnnnnnnnnnnnnnnnnnnnnnnnnnnnnnnnnnnnnnnnnnnnnnnnnnnnnnnnnnnnnnnnnnnnnnnnnnnnnnnnnnnnnnnnnnnnnnnnnnnnnnnnnnnnnnnnnnnnnnnnnnnnnnnnnnnnnnnnnnnnnnnnnnnnnnnnnnnnnnnnnnnnnnnnnnnnnnnnnnnnnnnnnnnnnnnnnnnnnnnnnnnnnnnnnnnnnnnnnnnnnnnnnnnnnnnnnnnnnnnnnnnnnnnnnnnnnnnnnnnnnnnnnnnnnnnnnnnnnnnnnnnnnnnnnnnnnnnnnnnnnnnnnnnnnnnnnnnnnnnnnnnnnnnnnnnnnnnnnnnnnnnnnnnnnnnnnnnnnnnnnnnnnnnnnnnnnnnnnnnnnnnnnnnnnnnnnnnnnnnnnnnnnnnnnnnnnnnnnnnnnnnnnnnnnnnnnnnnnnnnnnnnnnnnnnnnnnnnnnnnnnnnnnnnnnnnnnnnnnnnnnnnnnnnnnnnnnnnnnnnnnnnnnnnnnnnnnnnnnnnnnnnnnnnnnnnnnnnnnnnnnnnnnnnnnnnnnnnnnnnnnnnnnnnnnnnnnnnnnnnnnnnnnnnnnnnnnnnnnnnnnnnnnnnnnnnnnnnnnnnnnnnnnnnnnnnnnnnnnnnnnnnnnnnnnnnnnnnnnnnnnnnnnnnnnnnnnnnnnnnnnnnnnnnnnnnnnnnnnnnnnnnnnnnnnnnnnnnnnnnnnnnnnnnnnnnnnnnnnnnnnnnnnnnnnnnnnnnnnnnnnnnnnnnnnnnnnnnnnnnnnnnnnnnnnnnnnnnnnnnnnnnnnnnnnnnnnnnnnnnnnnnnnnnnnnnnnnnnnnnnnnnnnnnnnnnnnnnnnnnnnnnnnnnnnnnnnnnnnnnnnnnnnnnnnnnnnnnnnnnnnnnnnnnnnnnnnnnnnnnnnnnnnnnnnnnnnnnnnnnnnnnnnnnnnnnnnnnnnnnnnnnnnnnnnnnnnnnnnnnnnnnnnnnnnnnnnnnnnnnnnnnnnnnnnnnnnnnnnnnnnnnnnnnnnnnnnnnnnnnnnnnnnnnnnnnnnnnnnnnnnnnnnnnnnnnnnnnnnnnnnnnnnnnnnnnnnnnnnnnnnnnnnnnnnnnnnnnnnnnnnnnnnnnnnnnnnnnnnnnnnnnnnnnnnnnnnnnnnnnnnnnnnnnnnnnnnnnnnnnnnnnnnnnnnnnnnnnnnnnnnnnnnnnnnnnnnnnnnnnnnnnnnnnnnnnnnnnnnnnnnnnnnnnnnnnnnnnnnnnnnnnnnnnnnnnnnnnnnnnnnnnnnnnnnnnnnnnnnnnnnnnnnnnnnnnnnnnnnnnnnnnnnnnnnnnnnnnnnnnnnnnnnnnnnnnnnnnnnnnnnnnnnnnnnnnnnnnnnnnnnnnnnnnnnnnnnnnnnnnnnnnnnnnnnnnnnnnnnnnnnnnnnnnnnnnnnnnnnnnnnnnnnnnnnnnnnnnnnnnnnnnnnnnnnnnnnnnnnnnnnnnnnnnnnnnnnnnnnnnnnnnnnnnnnnnnnnnnnnnnnnnnnnnnnnnnnnnnnnnnnnnnnnnnnnnnnnnnnnnnnnnnnnnnnnnnnnnnnnnnnnnnnnnnnnnnnnnnnnnnnnnnnnnnnnnnnnnnnnnnnnnnnnnnnnnnnnnnnnnnnnnnnnnnnnnnnnnnnnnnnnnnnnnnnnnnnnnnnnnnnnnnnnnnnnnnnnnnnnnnnnnnnnnnnnnnnnnnnnnnnnnnnnnnnnnnnnnnnnnnnnnnnnnnnnnnnnnnnnnnnnnnnnnnnnnnnnnnnnnnnnnnnnnnnnnnnnnnnnnnnnnnnnnnnnnnnnnnnnnnnnnnnnnnnnnnnnnnnnnnnnnnnnnnnnnnnnnnnnnnnnnnnnnnnnnnnnnnnnnnnnnnnnnnnnnnnnnnnnnnnnnnnnnnnnnnnnnnnnnnnnnnnnnnnnnnnnnnnnnnnnnnnnnnnnnnnnnnnnnnnnnnnnnnnnnnnnnnnnnnnnnnnnnnnnnnnnnnnnnnnnnnnnnnnnnnnnnnnnnnnnnnnnnnnnnnnnnnnnnnnnnnnnnnnnnnnnnnnnnnnnnnnnnnnnnnnnnnnnnnnnnnnnnnnnnnnnnnnnnnnnnnnnnnnnnnnnnnnnnnnnnnnnnnnnnnnnnnnnnnnnnnnnnnnnnnnnnnnnnnnnnnnnnnnnnnnnnnnnnnnnnnnnnnnnnnnnnnnnnnnnnnnnnnnnnnnnnnnnnnnnnnnnnnnnnnnnnnnnnnnnnnnnnnnnnnnnnnnnnnnnnnnnnnnnnnnnnnnnnnnnnnnnnnnnnnnnnnnnnnnnnnnnnnnnnnnnnnnnnnnnnnnnnnnnnnnnnnnnnnnnnnnnnnnnnnnnnnnnnnnnnnnnnnnnnnnnnnnnnnnnnnnnnnnnnnnnnnnnnnnnnnnnnnnnnnnnnnnnnnnnnnnnnnnnnnnnnnnnnnnnnnnnnnnnnnnnnnnnnnnnnnnnnnnnnnnnnnnnnnnnnnnnnnnnnnnnnnnnnnnnnnnnnnnnnnnnnnnnnnnnnnnnnnnnnnnnnnnnnnnnnnnnnnnnnnnnnnnnnnnnnnnnnnnnnnnnnnnnnnnnnnnnnnnnnnnnnnnnnnnnnnnnnnnnnnnnnnnnnnnnnnnnnnnnnnnnnnnnnnnnnnnnnnnnnnnnnnnnnnnnnnnnnnnnnnnnnnnnnnnnnnnnnnnnnnnnnnnnnnnnnnnnnnnnnnnnnnnnnnnnnnnnnnnnnnnnnnnnnnnnnnnnnnnnnnnnnnnnnnnnnnnnnnnnnnnnnnnnnnnnnnnnnnnnnnnnnnnnnnnnnnnnnnnnnnnnnnnnnnnnnnnnnnnnnnnnnnnnnnnnnnnnnnnnnnnnnnnnnnnnnnnnnnnnnnnnnnnnnnnnnnnnnnnnnnnnnnnnnnnnnnnnnnnnnnnnnnnnnnnnnnnnnnnnnnnnnnnnnnnnnnnnnnnnnnnnnnnnnnnnnnnnnnnnnnnnnnnnnnnnnnnnnnnnnnnnnnnnnnnnnnnnnnnnnnnnnnnnnnnnnnnnnnnnnnnnnnnnnnnnnnnnnnnnnnnnnnnnnnnnnnnnnnnnnnnnnnnnnnnnnnnnnnnnnnnnnnnnnnnnnnnnnnnnnnnnnnnnnnnnnnnnnnnnnnnnnnnnnnnnnnnnnnnnnnnnnnnnnnnnnnnnnnnnnnnnnnnnnnnnnnnnnnnnnnnnnnnnnnnnnnnnnnnnnnnnnnnnnnnnnnnnnnnnnnnnnnnnnnnnnnnnnnnnnnnnnnnnnnnnnnnnnnnnnnnnnnnnnnnnnnnnnnnnnnnnnnnnnnnnnnnnnnnnnnnnnnnnnnnnnnnnnnnnnnnnnnnnnnnnnnnnnnnnnnnnnnnnnnnnnnnnnnnnnnnnnnnnnnnnnnnnnnnnnnnnnnnnnnnnnnnnnnnnnnnnnnnnnnnnnnnnnnnnnnnnnnnnnnnnnnnnnnnnnnnnnnnnnnnnnnnnnnnnnnnnnnnnnnnnnnnnnnnnnnnnnnnnnnnnnnnnnnnnnnnnnnnnnnnnnnnnnnnnnnnnnnnnnnnnnnnnnnnnnnnnnnnnnnnnnnnnnnnnnnnnnnnnnnnnnnnnnnnnnnnnnnnnnnnnnnnnnnnnnnnnnnnnnnnnnnnnnnnnnnnnnnnnnnnnnnnnnnnnnnnnnnnnnnnnnnnnnnnnnnnnnnnnnnnnnnnnnnnnnnnnnnnnnnnnnnnnnnnnnnnnnnnnnnnnnnnnnnnnnnnnnnnnnnnnnnnnnnnnnnnnnnnnnnnnnnnnnnnnnnnnnnnnnnnnnnnnnnnnnnnnnnnnnnnnnnnnnnnnnnnnnnnnnnnnnnnnnnnnnnnnnnnnnnnnnnnnnnnnnnnnnnnnnnnnnnnnnnnnnnnnnnnnnnnnnnnnnnnnnnnnnnnnnnnnnnnnnnnnnnnnnnnnnnnnnnnnnnnnnnnnnnnnnnnnnnnnnnnnnnnnnnnnnnnnnnnnnnnnnnnnnnnnnnnnnnnnnnnnnnnnnnnnnnnnnnnnnnnnnnnnnnnnnnnnnnnnnnnnnnnnnnnnnnnnnnnnnnnnnnnnnnnnnnnnnnnnnnnnnnnnnnnnnnnnnnnnnnnnnnnnnnnnnnnnnnnnnnnnnnnnnnnnnnnnnnnnnnnnnnnnnnnnnnnnnnnnnnnnnnnnnnnnnnnnnnnnnnnnnnnnnnnnnnnnnnnnnnnnnnnnnnnnnnnnnnnnnnnnnnnnnnnnnnnnnnnnnnnnnnnnnnnnnnnnnnnnnnnnnnnnnnnnnnnnnnnnnnnnnnnnnnnnnnnnnnnnnnnnnnnnnnnnnnnnnnnnnnnnnnnnnnnnnnnnnnnnnnnnnnnnnnnnnnnnnnnnnnnnnnnnnnnnnnnnnnnnnnnnnnnnnnnnnnnnnnnnnnnnnnnnnnnnnnnnnnnnnnnnnnnnnnnnnnnnnnnnnnnnnnnnnnnnnnnnnnnnnnnnnnnnnnnnnnnnnnnnnnnnnnnnnnnnnnnnnnnnnnnnnnnnnnnnnnnnnnnnnnnnnnnnnnnnnnnnnnnnnnnnnnnnnnnnnnnnnnnnnnnnnnnnnnnnnnnnnnnnnnnnnnnnnnnnnnnnnnnnnnnnnnnnnnnnnnnnnnnnnnnnnnnnnnnnnnnnnnnnnnnnnnnnnnnnnnnnnnnnnnnnnnnnnnnnnnnnnnnnnnnnnnnnnnnnnnnnnnnnnnnnnnnnnnnnnnnnnnnnnnnnnnnnnnnnnnnnnnnnnnnnnnnnnnnnnnnnnnnnnnnnnnnnnnnnnnnnnnnnnnnnnnnnnnnnnnnnnnnnnnnnnnnnnnnnnnnnnnnnnnnnnnnnnnnnnnnnnnnnnnnnnnnnnnnnnnnnnnnnnnnnnnnnnnnnnnnnnnnnnnnnnnnnnnnnnnnnnnnnnnnnnnnnnnnnnnnnnnnnnnnnnnnnnnnnnnnnnnnnnnnnnnnnnnnnnnnnnnnnnnnnnnnnnnnnnnnnnnnnnnnnnnnnnnnnnnnnnnnnnnnnnnnnnnnnnnnnnnnnnnnnnnnnnnnnnnnnnnnnnnnnnnnnnnnnnnnnnnnnnnnnnnnnnnnnnnnnnnnnnnnnnnnnnnnnnnnnnnnnnnnnnnnnnnnnnnnnnnnnnnnnnnnnnnnnnnnnnnnnnnnnnnnnnnnnnnnnnnnnnnnnnnnnnnnnnnnnnnnnnnnnnnnnnnnnnnnnnnnnnnnnnnnnnnnnnnnnnnnnnnnnnnnnnnnnnnnnnnnnnnnnnnnnnnnnnnnnnnnnnnnnnnnnnnnnnnnnnnnnnnnnnnnnnnnnnnnnnnnnnnnnnnnnnnnnnnnnnnnnnnnnnnnnnnnnnnnnnnnnnnnnnnnnnnnnnnnnnnnnnnnnnnnnnnnnnnnnnnnnnnnnnnnnnnnnnnnnnnnnnnnnnnnnnnnnnnnnnnnnnnnnnnnnnnnnnnnnnnnnnnnnnnnnnnnnnnnnnnnnnnnnnnnnnnnnnnnnnnnnnnnnnnnnnnnnnnnnnnnnnnnnnnnnnnnnnnnnnnnnnnnnnnnnnnnnnnnnnnnnnnnnnnnnnnnnnnnnnnnnnnnnnnnnnnnnnnnnnnnnnnnnnnnnnnnnnnnnnnnnnnnnnnnnnnnnnnnnnnnnnnnnnnnnnnnnnnnnnnnnnnnnnnnnnnnnnnnnnnnnnnnnnnnnnnnnnnnnnnnnnnnnnnnnnnnnnnnnnnnnnnnnnnnnnnnnnnnnnnnnnnnnnnnnnnnnnnnnnnnnnnnnnnnnnnnnnnnnnnnnnnnnnnnnnnnnnnnnnnnnnnnnnnnnnnnnnnnnnnnnnnnnnnnnnnnnnnnnnnnnnnnnnnnnnnnnnnnnnnnnnnnnnnnnnnnnnnnnnnnnnnnnnnnnnnnnnnnnnnnnnnnnnnnnnnnnnnnnnnnnnnnnnnnnnnnnnnnnnnnnnnnnnnnnnnnnnnnnnnnnnnnnnnnnnnnnnnnnnnnnnnnnnnnnnnnnnnnnnnnnnnnnnnnnnnnnnnnnnnnnnnnnnnnnnnnnnnnnnnnnnnnnnnnnnnnnnnnnnnnnnnnnnnnnnnnnnnnnnnnnnnnnnnnnnnnnnnnnnnnnnnnnnnnnnnnnnnnnnnnnnnnnnnnnnnnnnnnnnnnnnnnnnnnnnnnnnnnnnnnnnnnnnnnnnnnnnnnnnnnnnnnnnnnnnnnnnnnnnnnnnnnnnnnnnnnnnnnnnnnnnnnnnnnnnnnnnnnnnnnnnnnnnnnnnnnnnnnnnnnnnnnnnnnnnnnnnnnnnnnnnnnnnnnnnnnnnnnnnnnnnnnnnnnnnnnnnnnnnnnnnnnnnnnnnnnnnnnnnnnnnnnnnnnnnnnnnnnnnnnnnnnnnnnnnnnnnnnnnnnnnnnnnnnnnnnnnnnnnnnnnnnnnnnnnnnnnnnnnnnnnnnnnnnnnnnnnnnnnnnnnnnnnnnnnnnnnnnnnnnnnnnnnnnnnnnnnnnnnnnnnnnnnnnnnnnnnnnnnnnnnnnnnnnnnnnnnnnnnnnnnnnnnnnnnnnnnnnnnnnnnnnnnnnnnnnnnnnnnnnnnnnnnnnnnnnnnnnnnnnnnnnnnnnnnnnnnnnnnnnnnnnnnnnnnnnnnnnnnnnnnnnnnnnnnnnnnnnnnnnnnnnnnnnnnnnnnnnnnnnnnnnnnnnnnnnnnnnnnnnnnnnnnnnnnnnnnnnnnnnnnnnnnnnnnnnnnnnnnnnnnnnnnnnnnnnnnnnnnnnnnnnnnnnnnnnnnnnnnnnnnnnnnnnnnnnnnnnnnnnnnnnnnnnnnnnnnnnnnnnnnnnnnnnnnnnnnnnnnnnnnnnnnnnnnnnnnnnnnnnnnnnnnnnnnnnnnnnnnnnnnnnnnnnnnnnnnnnnnnnnnnnnnnnnnnnnnnnnnnnnnnnnnnnnnnnnnnnnnnnnnnnnnnnnnnnnnnnnnnnnnnnnnnnnnnnnnnnnnnnnnnnnnnnnnnnnnnnnnnnnnnnnnnnnnnnnnnnnnnnnnnnnnnnnnnnnnnnnnnnnnnnnnnnnnnnnnnnnnnnnnnnnnnnnnnnnnnnnnnnnnnnnnnnnnnnnnnnnnnnnnnnnnnnnnnnnnnnnnnnnnnnnnnnnnnnnnnnnnnnnnnnnnnnnnnnnnnnnnnnnnnnnnnnnnnnnnnnnnnnnnnnnnnnnnnnnnnnnnnnnnnnnnnnnnnnnnnnnnnnnnnnnnnnnnnnnnnnnnnnnnnnnnnnnnnnnnnnnnnnnnnnnnnnnnnnnnnnnnnnnnnnnnnnnnnnnnnnnnnnnnnnnnnnnnnnnnnnnnnnnnnnnnnnnnnnnnnnnnnnnnnnnnnnnnnnnnnnnnnnnnnnnnnnnnnnnnnnnnnnnnnnnnnnnnnnnnnnnnnnnnnnnnnnnnnnnnnnnnnnnnnnnnnnnnnnnnnnnnnnnnnnnnnnnnnnnnnnnnnnnnnnnnnnnnnnnnnnnnnnnnnnnnnnnnnnnnnnnnnnnnnnnnnnnnnnnnnnnnnnnnnnnnnnnnnnnnnnnnnnnnnnnnnnnnnnnnnnnnnnnnnnnnnnnnnnnnnnnnnnnnnnnnnnnnnnnnnnnnnnnnnnnnnnnnnnnnnnnnnnnnnnnnnnnnnnnnnnnnnnnnnnnnnnnnnnnnnnnnnnnnnnnnnnnnnnnnnnnnnnnnnnnnnnnnnnnnnnnnnnnnnnnnnnnnnnnnnnnnnnnnnnnnnnnnnnnnnnnnnnnnnnnnnnnnnnnnnnnnnnnnnnnnnnnnnnnnnnnnnnnnnnnnnnnnnnnnnnnnnnnnnnnnnnnnnnnnnnnnnnnnnnnnnnnnnnnnnnnnnnnnnnnnnnnnnnnnnnnnnnnnnnnnnnnnnnnnnnnnnnnnnnnnnnnnnnnnnnnnnnnnnnnnnnnnnnnnnnnnnnnnnnnnnnnnnnnnnnnnnnnnnnnnnnnnnnnnnnnnnnnnnnnnnnnnnnnnnnnnnnnnnnnnnnnnnnnnnnnnnnnnnnnnnnnnnnnnnnnnnnnnnnnnnnnnnnnnnnnnnnnnnnnnnnnnnnnnnnnnnnnnnnnnnnnnnnnnnnnnnnnnnnnnnnnnnnnnnnnnnnnnnnnnnnnnnnnnnnnnnnnnnnnnnnnnnnnnnnnnnnnnnnnnnnnnnnnnnnnnnnnnnnnnnnnnnnnnnnnnnnnnnnnnnnnnnnnnnnnnnnnnnnnnnnnnnnnnnnnnnnnnnnnnnnnnnnnnnnnnnnnnnnnnnnnnnnnnnnnnnnnnnnnnnnnnnnnnnnnnnnnnnnnnnnnnnnnnnnnnnnnnnnnnnnnnnnnnnnnnnnnnnnnnnnnnnnnnnnnnnnnnnnnnnnnnnnnnnnnnnnnnnnnnnnnnnnnnnnnnnnnnnnnnnnnnnnnnnnnnnnnnnnnnnnnnnnnnnnnnnnnnnnnnnnnnnnnnnnnnnnnnnnnnnnnnnnnnnnnnnnnnnnnnnnnnnnnnnnnnnnnnnnnnnnnnnnnnnnnnnnnnnnnnnnnnnnnnnnnnnnnnnnnnnnnnnnnnnnnnnnnnnnnnnnnnnnnnnnnnnnnnnnnnnnnnnnnnnnnnnnnnnnnnnnnnnnnnnnnnnnnnnnnnnnnnnnnnnnnnnnnnnnnnnnnnnnnnnnnnnnnnnnnnnnnnnnnnnnnnnnnnnnnnnnnnnnnnnnnnnnnnnnnnnnnnnnnnnnnnnnnnnnnnnnnnnnnnnnnnnnnnnnnnnnnnnnnnnnnnnnnnnnnnnnnnnnnnnnnnnnnnnnnnnnnnnnnnnnnnnnnnnnnnnnnnnnnnnnnnnnnnnnnnnnnnnnnnnnnnnnnnnnnnnnnnnnnnnnnnnnnnnnnnnnnnnnnnnnnnnnnnnnnnnnnnnnnnnnnnnnnnnnnnnnnnnnnnnnnnnnnnnnnnnnnnnnnnnnnnnnnnnnnnnnnnnnnnnnnnnnnnnnnnnnnnnnnnnnnnnnnnnnnnnnnnnnnnnnnnnnnnnnnnnnnnnnnnnnnnnnnnnnnnnnnnnnnnnnnnnnnnnnnnnnnnnnnnnnnnnnnnnnnnnnnnnnnnnnnnnnnnnnnnnnnnnnnnnnnnnnnnnnnnnnnnnnnnnnnnnnnnnnnnnnnnnnnnnnnnnnnnnnnnnnnnnnnnnnnnnnnnnnnnnnnnnnnnnnnnnnnnnnnnnnnnnnnnnnnnnnnnnnnnnnnnnnnnnnnnnnnnnnnnnnnnnnnnnnnnnnnnnnnnnnnnnnnnnnnnnnnnnnnnnnnnnnnnnnnnnnnnnnnnnnnnnnnnnnnnnnnnnnnnnnnnnnnnnnnnnnnnnnnnnnnnnnnnnnnnnnnnnnnnnnnnnnnnnnnnnnnnnnnnnnnnnnnnnnnnnnnnnnnnnnnnnnnnnnnnnnnnnnnnnnnnnnnnnnnnnnnnnnnnnnnnnnnnnnnnnnnnnnnnnnnnnnnnnnnnnnnnnnnnnnnnnnnnnnnnnnnnnnnnnnnnnnnnnnnnnnnnnnnnnnnnnnnnnnnnnnnnnnnnnnnnnnnnnnnnnnnnnnnnnnnnnnnnnnnnnnnnnnnnnnnnnnnnnnnnnnnnnnnnnnnnnnnnnnnnnnnnnnnnnnnnnnnnnnnnnnnnnnnnnnnnnnnnnnnnnnnnnnnnnnnnnnnnnnnnnnnnnnnnnnnnnnnnnnnnnnnnnnnnnnnnnnnnnnnnnnnnnnnnnnnnnnnnnnnnnnnnnnnnnnnnnnnnnnnnnnnnnnnnnnnnnnnnnnnnnnnnnnnnnnnnnnnnnnnnnnnnnnnnnnnnnnnnnnnnnnnnnnnnnnnnnnnnnnnnnnnnnnnnnnnnnnnnnnnnnnnnnnnnnnnnnnnnnnnnnnnnnnnnnnnnnnnnnnnnnnnnnnnnnnnnnnnnnnnnnnnnnnnnnnnnnnnnnnnnnnnnnnnnnnnnnnnnnnnnnnnnnnnnnnnnnnnnnnnnnnnnnnnnnnnnnnnnnnnnnnnnnnnnnnnnnnnnnnnnnnnnnnnnnnnnnnnnnnnnnnnnnnnnnnnnnnnnnnnnnnnnnnnnnnnnnnnnnnnnnnnnnnnnnnnnnnnnnnnnnnnnnnnnnnnnnnnnnnnnnnnnnnnnnnnnnnnnnnnnnnnnnnnnnnnnnnnnnnnnnnnnnnnnnnnnnnnnnnnnnnnnnnnnnnnnnnnnnnnnnnnnnnnnnnnnnnnnnnnnnnnnnnnnnnnnnnnnnnnnnnnnnnnnnnnnnnnnnnnnnnnnnnnnnnnnnnnnnnnnnnnnnnnnnnnnnnnnnnnnnnnnnnnnnnnnnnnnnnnnnnnnnnnnnnnnnnnnnnnnnnnnnnnnnnnnnnnnnnnnnnnnnnnnnnnnnnnnnnnnnnnnnnnnnnnnnnnnnnnnnnnnnnnnnnnnnnnnnnnnnnnnnnnnnnnnnnnnnnnnnnnnnnnnnnnnnnnnnnnnnnnnnnnnnnnnnnnnnnnnnnnnnnnnnnnnnnnnnnnnnnnnnnnnnnnnnnnnnnnnnnnnnnnnnnnnnnnnnnnnnnnnnnnnnnnnnnnnnnnnnnnnnnnnnnnnnnnnnnnnnnnnnnnnnnnnnnnnnnnnnnnnnnnnnnnnnnnnnnnnnnnnnnnnnnnnnnnnnnnnnnnnnnnnnnnnnnnnnnnnnnnnnnnnnnnnnnnnnnnnnnnnnnnnnnnnnnnnnnnnnnnnnnnnnnnnnnnnnnnnnnnnnnnnnnnnnnnnnnnnnnnnnnnnnnnnnnnnnnnnnnnnnnnnnnnnnnnnnnnnnnnnnnnnnnnnnnnnnnnnnnnnnnnnnnnnnnnnnnnnnnnnnnnnnnnnnnnnnnnnnnnnnnnnnnnnnnnnnnnnnnnnnnnnnnnnnnnnnnnnnnnnnnnnnnnnnnnnnnnnnnnnnnnnnnnnnnnnnnnnnnnnnnnnnnnnnnnnnnnnnnnnnnnnnnnnnnnnnnnnnnnnnnnnnnnnnnnnnnnnnnnnnnnnnnnnnnnnnnnnnnnnnnnnnnnnnnnnnnnnnnnnnnnnnnnnnnnnnnnnnnnnnnnnnnnnnnnnnnnnnnnnnnnnnnnnnnnnnnnnnnnnnnnnnnnnnnnnnnnnnnnnnnnnnnnnnnnnnnnnnnnnnnnnnnnnnnnnnnnnnnnnnnnnnnnnnnnnnnnnnnnnnnnnnnnnnnnnnnnnnnnnnnnnnnnnnnnnnnnnnnnnnnnnnnnnnnnnnnnnnnnnnnnnnnnnnnnnnnnnnnnnnnnnnnnnnnnnnnnnnnnnnnnnnnnnnnnnnnnnnnnnnnnnnnnnnnnnnnnnnnnnnnnnnnnnnnnnnnnnnnnnnnnnnnnnnnnnnnnnnnnnnnnnnnnnnnnnnnnnnnnnnnnnnnnnnnnnnnnnnnnnnnnnnnnnnnnnnnnnnnnnnnnnnnnnnnnnnnnnnnnnnnnnnnnnnnnnnnnnnnnnnnnnnnnnnnnnnnnnnnnnnnnnnnnnnnnnnnnnnnnnnnnnnnnnnnnnnnnnnnnnnnnnnnnnnnnnnnnnnnnnnnnnnnnnnnnnnnnnnnnnnnnnnnnnnnnnnnnnnnnnnnnnnnnnnnnnnnnnnnnnnnnnnnnnnnnnnnnnnnnnnnnnnnnnnnnnnnnnnnnnnnnnnnnnnnnnnnnnnnnnnnnnnnnnnnnnnnnnnnnnnnnnnnnnnnnnnnnnnnnnnnnnnnnnnnnnnnnnnnnnnnnnnnnnnnnnnnnnnnnnnnnnnnnnnnnnnnnnnnnnnnnnnnnnnnnnnnnnnnnnnnnnnnnnnnnnnnnnnnnnnnnnnnnnnnnnnnnnnnnnnnnnnnnnnnnnnnnnnnnnnnnnnnnnnnnnnnnnnnnnnnnnnnnnnnnnnnnnnnnnnnnnnnnnnnnnnnnnnnnnnnnnnnnnnnnnnnnnnnnnnnnnnnnnnnnnnnnnnnnnnnnnnnnnnnnnnnnnnnnnnnnnnnnnnnnnnnnnnnnnnnnnnnnnnnnnnnnnnnnnnnnnnnnnnnnnnnnnnnnnnnnnnnnnnnnnnnnnnnnnnnnnnnnnnnnnnnnnnnnnnnnnnnnnnnnnnnnnnnnnnnnnnnnnnnnnnnnnnnnnnnnnnnnnnnnnnnnnnnnnnnnnnnnnnnnnnnnnnnnnnnnnnnnnnnnnnnnnnnnnnnnnnnnnnnnnnnnnnnnnnnnnnnnnnnnnnnnnnnnnnnnnnnnnnnnnnnnnnnnnnnnnnnnnnnnnnnnnnnnnnnnnnnnnnnnnnnnnnnnnnnnnnnnnnnnnnnnnnnnnnnnnnnnnnnnnnnnnnnnnnnnnnnnnnnnnnnnnnnnnnnnnnnnnnnnnnnnnnnnnnnnnnnnnnnnnnnnnnnnnnnnnnnnnnnnnnnnnnnnnnnnnnnnnnnnnnnnnnnnnnnnnnnnnnnnnnnnnnnnnnnnnnnnnnnnnnnnnnnnnnnnnnnnnnnnnnnnnnnnnnnnnnnnnnnnnnnnnnnnnnnnnnnnnnnnnnnnnnnnnnnnnnnnnnnnnnnnnnnnnnnnnnnnnnnnnnnnnnnnnnnnnnnnnnnnnnnnnnnnnnnnnnnnnnnnnnnnnnnnnnnnnnnnnnnnnnnnnnnnnnnnnnnnnnnnnnnnnnnnnnnnnnnnnnnnnnnnnnnnnnnnnnnnnnnnnnnnnnnnnnnnnnnnnnnnnnnnnnnnnnnnnnnnnnnnnnnnnnnnnnnnnnnnnnnnnnnnnnnnnnnnnnnnnnnnnnnnnnnnnnnnnnnnnnnnnnnnnnnnnnnnnnnnnnnnnnnnnnnnnnnnnnnnnnnnnnnnnnnnnnnnnnnnnnnnnnnnnnnnnnnnnnnnnnnnnnnnnnnnnnnnnnnnnnnnnnnnnnnnnnnnnnnnnnnnnnnnnnnnnnnnnnnnnnnnnnnnnnnnnnnnnnnnnnnnnnnnnnnnnnnnnnnnnnnnnnnnnnnnnnnnnnnnnnnnnnnnnnnnnnnnnnnnnnnnnnnnnnnnnnnnnnnnnnnnnnnnnnnnnnnnnnnnnnnnnnnnnnnnnnnnnnnnnnnnnnnnnnnnnnnnnnnnnnnnnnnnnnnnnnnnnnnnnnnnnnnnnnnnnnnnnnnnnnnnnnnnnnnnnnnnnnnnnnnnnnnnnnnnnnnnnnnnnnnnnnnnnnnnnnnnnnnnnnnnnnnnnnnnnnnnnnnnnnnnnnnnnnnnnnnnnnnnnnnnnnnnnnnnnnnnnnnnnnnnnnnnnnnnnnnnnnnnnnnnnnnnnnnnnnnnnnnnnnnnnnnnnnnnnnnnnnnnnnnnnnnnnnnnnnnnnnnnnnnnnnnnnnnnnnnnnnnnnnnnnnnnnnnnnnnnnnnnnnnnnnnnnnnnnnnnnnnnnnnnnnnnnnnnnnnnnnnnnnnnnnnnnnnnnnnnnnnnnnnnnnnnnnnnnnnnnnnnnnnnnnnnnnnnnnnnnnnnnnnnnnnnnnnnnnnnnnnnnnnnnnnnnnnnnnnnnnnnnnnnnnnnnnnnnnnnnnnnnnnnnnnnnnnnnnnnnnnnnnnnnnnnnnnnnnnnnnnnnnnnnnnnnnnnnnnnnnnnnnnnnnnnnnnnnnnnnnnnnnnnnnnnnnnnnnnnnnnnnnnnnnnnnnnnnnnnnnnnnnnnnnnnnnnnnnnnnnnnnnnnnnnnnnnnnnnnnnnnnnnnnnnnnnnnnnnnnnnnnnnnnnnnnnnnnnnnnnnnnnnnnnnnnnnnnnnnnnnnnnnnnnnnnnnnnnnnnnnnnnnnnnnnnnnnnnnnnnnnnnnnnnnnnnnnnnnnnnnnnnnnnnnnnnnnnnnnnnnnnnnnnnnnnnnnnnnnnnnnnnnnnnnnnnnnnnnnnnnnnnnnnnnnnnnnnnnnnnnnnnnnnnnnnnnnnnnnnnnnnnnnnnnnnnnnnnnnnnnnnnnnnnnnnnnnnnnnnnnnnnnnnnnnnnnnnnnnnnnnnnnnnnnnnnnnnnnnnnnnnnnnnnnnnnnnnnnnnnnnnnnnnnnnnnnnnnnnnnnnnnnnnnnnnnnnnnnnnnnnnnnnnnnnnnnnnnnnnnnnnnnnnnnnnnnnnnnnnnnnnnnnnnnnnnnnnnnnnnnnnnnnnnnnnnnnnnnnnnnnnnnnnnnnnnnnnnnnnnnnnnnnnnnnnnnnnnnnnnnnnnnnnnnnnnnnnnnnnnnnnnnnnnnnnnnnnnnnnnnnnnnnnnnnnnnnnnnnnnnnnnnnnnnnnnnnnnnnnnnnnnnnnnnnnnnnnnnnnnnnnnnnnnnnnnnnnnnnnnnnnnnnnnnnnnnnnnnnnnnnnnnnnnnnnnnnnnnnnnnnnnnnnnnnnnnnnnnnnnnnnnnnnnnnnnnnnnnnnnnnnnnnnnnnnnnnnnnnnnnnnnnnnnnnnnnnnnnnnnnnnnnnnnnnnnnnnnnnnnnnnnnnnnnnnnnnnnnnnnnnnnnnnnnnnnnnnnnnnnnnnnnnnnnnnnnnnnnnnnnnnnnnnnnnnnnnnnnnnnnnnnnnnnnnnnnnnnnnnnnnnnnnnnnnnnnnnnnnnnnnnnnnnnnnnnnnnnnnnnnnnnnnnnnnnnnnnnnnnnnnnnnnnnnnnnnnnnnnnnnnnnnnnnnnnnnnnnnnnnnnnnnnnnnnnnnnnnnnnnnnnnnnnnnnnnnnnnnnnnnnnnnnnnnnnnnnnnnnnnnnnnnnnnnnnnnnnnnnnnnnnnnnnnnnnnnnnnnnnnnnnnnnnnnnnnnnnnnnnnnnnnnnnnnnnnnnnnnnnnnnnnnnnnnnnnnnnnnnnnnnnnnnnnnnnnnnnnnnnnnnnnnnnnnnnnnnnnnnnnnnnnnnnnnnnnnnnnnnnnnnnnnnnnnnnnnnnnnnnnnnnnnnnnnnnnnnnnnnnnnnnnnnnnnnnnnnnnnnnnnnnnnnnnnnnnnnnnnnnnnnnnnnnnnnnnnnnnnnnnnnnnnnnnnnnnnnnnnnnnnnnnnnnnnnnnnnnnnnnnnnnnnnnnnnnnnnnnnnnnnnnnnnnnnnnnnnnnnnnnnnnnnnnnnnnnnnnnnnnnnnnnnnnnnnnnnnnnnnnnnnnnnnnnnnnnnnnnnnnnnnnnnnnnnnnnnnnnnnnnnnnnnnnnnnnnnnnnnnnnnnnnnnnnnnnnnnnnnnnnnnnnnnnnnnnnnnnnnnnnnnnnnnnnnnnnnnnnnnnnnnnnnnnnnnnnnnnnnnnnnnnnnnnnnnnnnnnnnnnnnnnnnnnnnnnnnnnnnnnnnnnnnnnnnnnnnnnnnnnnnnnnnnnnnnnnnnnnnnnnnnnnnnnnnnnnnnnnnnnnnnnnnnnnnnnnnnnnnnnnnnnnnnnnnnnnnnnnnnnnnnnnnnnnnnnnnnnnnnnnnnnnnnnnnnnnnnnnnnnnnnnnnnnnnnnnnnnnnnnnnnnnnnnnnnnnnnnnnnnnnnnnnnnnnnnnnnnnnnnnnnnnnnnnnnnnnnnnnnnnnnnnnnnnnnnnnnnnnnnnnnnnnnnnnnnnnnnnnnnnnnnnnnnnnnnnnnnnnnnnnnnnnnnnnnnnnnnnnnnnnnnnnnnnnnnnnnnnnnnnnnnnnnnnnnnnnnnnnnnnnnnnnnnnnnnnnnnnnnnnnnnnnnnnnnnnnnnnnnnnnnnnnnnnnnnnnnnnnnnnnnnnnnnnnnnnnnnnnnnnnnnnnnnnnnnnnnnnnnnnnnnnnnnnnnnnnnnnnnnnnnnnnnnnnnnnnnnnnnnnnnnnnnnnnnnnnnnnnnnnnnnnnnnnnnnnnnnnnnnnnnnnnnnnnnnnnnnnnnnnnnnnnnnnnnnnnnnnnnnnnnnnnnnnnnnnnnnnnnnnnnnnnnnnnnnnnnnnnnnnnnnnnnnnnnnnnnnnnnnnnnnnnnnnnnnnnnnnnnnnnnnnnnnnnnnnnnnnnnnnnnnnnnnnnnnnnnnnnnnnnnnnnnnnnnnnnnnnnnnnnnnnnnnnnnnnnnnnnnnnnnnnnnnnnnnnnnnnnnnnnnnnnnnnnnnnnnnnnnnnnnnnnnnnnnnnnnnnnnnnnnnnnnnnnnnnnnnnnnnnnnnnnnnnnnnnnnnnnnnnnnnnnnnnnnnnnnnnnnnnnnnnnnnnnnnnnnnnnnnnnnnnnnnnnnnnnnnnnnnnnnnnnnnnnnnnnnnnnnnnnnnnnnnnnnnnnnnnnnnnnnnnnnnnnnnnnnnnnnnnnnnnnnnnnnnnnnnnnnnnnnnnnnnnnnnnnnnnnnnnnnnnnnnnnnnnnnnnnnnnnnnnnnnnnnnnnnnnnnnnnnnnnnnnnnnnnnnnnnnnnnnnnnnnnnnnnnnnnnnnnnnnnnnnnnnnnnnnnnnnnnnnnnnnnnnnnnnnnnnnnnnnnnnnnnnnnnnnnnnnnnnnnnnnnnnnnnnnnnnnnnnnnnnnnnnnnnnnnnnnnnnnnnnnnnnnnnnnnnnnnnnnnnnnnnnnnnnnnnnnnnnnnnnnnnnnnnnnnnnnnnnnnnnnnnnnnnnnnnnnnnnnnnnnnnnnnnnnnnnnnnnnnnnnnnnnnnnnnnnnnnnnnnnnnnnnnnnnnnnnnnnnnnnnnnnnnnnnnnnnnnnnnnnnnnnnnnnnnnnnnnnnnnnnnnnnnnnnnnnnnnnnnnnnnnnnnnnnnnnnnnnnnnnnnnnnnnnnnnnnnnnnnnnnnnnnnnnnnnnnnnnnnnnnnnnnnnnnnnnnnnnnnnnnnnnnnnnnnnnnnnnnnnnnnnnnnnnnnnnnnnnnnnnnnnnnnnnnnnnnnnnnnnnnnnnnnnnnnnnnnnnnnnnnnnnnnnnnnnnnnnnnnnnnnnnnnnnnnnnnnnnnnnnnnnnnnnnnnnnnnnnnnnnnnnnnnnnnnnnnnnnnnnnnnnnnnnnnnnnnnnnnnnnnnnnnnnnnnnnnnnnnnnnnnnnnnnnnnnnnnnnnnnnnnnnnnnnnnnnnnnnnnnnnnnnnnnnnnnnnnnnnnnnnnnnnnnnnnnnnnnnnnnnnnnnnnnnnnnnnnnnnnnnnnnnnnnnnnnnnnnnnnnnnnnnnnnnnnnnnnnnnnnnnnnnnnnnnnnnnnnnnnnnnnnnnnnnnnnnnnnnnnnnnnnnnnnnnnnnnnnnnnnnnnnnnnnnnnnnnnnnnnnnnnnnnnnnnnnnnnnnnnnnnnnnnnnnnnnnnnnnnnnnnnnnnnnnnnnnnnnnnnnnnnnnnnnnnnnnnnnnnnnnnnnnnnnnnnnnnnnnnnnnnnnnnnnnnnnnnnnnnnnnnnnnnnnnnnnnnnnnnnnnnnnnnnnnnnnnnnnnnnnnnnnnnnnnnnnnnnnnnnnnnnnnnnnnnnnnnnnnnnnnnnnnnnnnnnnnnnnnnnnnnnnnnnnnnnnnnnnnnnnnnnnnnnnnnnnnnnnnnnnnnnnnnnnnnnnnnnnnnnnnnnnnnnnnnnnnnnnnnnnnnnnnnnnnnnnnnnnnnnnnnnnnnnnnnnnnnnnnnnnnnnnnnnnnnnnnnnnnnnnnnnnnnnnnnnnnnnnnnnnnnnnnnnnnnnnnnnnnnnnnnnnnnnnnnnnnnnnnnnnnnnnnnnnnnnnnnnnnnnnnnnnnnnnnnnnnnnnnnnnnnnnnnnnnnnnnnnnnnnnnnnnnnnnnnnnnnnnnnnnnnnnnnnnnnnnnnnnnnnnnnnnnnnnnnnnnnnnnnnnnnnnnnnnnnnnnnnnnnnnnnnnnnnnnnnnnnnnnnnnnnnnnnnnnnnnnnnnnnnnnnnnnnnnnnnnnnnnnnnnnnnnnnnnnnnnnnnnnnnnnnnnnnnnnnnnnnnnnnnnnnnnnnnnnnnnnnnnnnnnnnnnnnnnnnnnnnnnnnnnnnnnnnnnnnnnnnnnnnnnnnnnnnnnnnnnnnnnnnnnnnnnnnnnnnnnnnnnnnnnnnnnnnnnnnnnnnnnnnnnnnnnnnnnnnnnnnnnnnnnnnnnnnnnnnnnnnnnnnnnnnnnnnnnnnnnnnnnnnnnnnnnnnnnnnnnnnnnnnnnnnnnnnnnnnnnnnnnnnnnnnnnnnnnnnnnnnnnnnnnnnnnnnnnnnnnnnnnnnnnnnnnnnnnnnnnnnnnnnnnnnnnnnnnnnnnnnnnnnnnnnnnnnnnnnnnnnnnnnnnnnnnnnnnnnnnnnnnnnnnnnnnnnnnnnnnnnnnnnnnnnnnnnnnnnnnnnnnnnnnnnnnnnnnnnnnnnnnnnnnnnnnnnnnnnnnnnnnnnnnnnnnnnnnnnnnnnnnnnnnnnnnnnnnnnnnnnnnnnnnnnnnnnnnnnnnnnnnnnnnnnnnnnnnnnnnnnnnnnnnnnnnnnnnnnnnnnnnnnnnnnnnnnnnnnnnnnnnnnnnnnnnnnnnnnnnnnnnnnnnnnnnnnnnnnnnnnnnnnnnnnnnnnnnnnnnnnnnnnnnnnnnnnnnnnnnnnnnnnnnnnnnnnnnnnnnnnnnnnnnnnnnnnnnnnnnnnnnnnnnnnnnnnnnnnnnnnnnnnnnnnnnnnnnnnnnnnnnnnnnnnnnnnnnnnnnnnnnnnnnnnnnnnnnnnnnnnnnnnnnnnnnnnnnnnnnnnnnnnnnnnnnnnnnnnnnnnnnnnnnnnnnnnnnnnnnnnnnnnnnnnnnnnnnnnnnnnnnnnnnnnnnnnnnnnnnnnnnnnnnnnnnnnnnnnnnnnnnnnnnnnnnnnnnnnnnnnnnnnnnnnnnnnnnnnnnnnnnnnnnnnnnnnnnnnnnnnnnnnnnnnnnnnnnnnnnnnnnnnnnnnnnnnnnnnnnnnnnnnnnnnnnnnnnnnnnnnnnnnnnnnnnnnnnnnnnnnnnnnnnnnnnnnnnnnnnnnnnnnnnnnnnnnnnnnnnnnnnnnnnnnnnnnnnnnnnnnnnnnnnnnnnnnnnnnnnnnnnnnnnnnnnnnnnnnnnnnnnnnnnnnnnnnnnnnnnnnnnnnnnnnnnnnnnnnnnnnnnnnnnnnnnnnnnnnnnnnnnnnnnnnnnnnnnnnnnnnnnnnnnnnnnnnnnnnnnnnnnnnnnnnnnnnnnnnnnnnnnnnnnnnnnnnnnnnnnnnnnnnnnnnnnnnnnnnnnnnnnnnnnnnnnnnnnnnnnnnnnnnnnnnnnnnnnnnnnnnnnnnnnnnnnnnnnnnnnnnnnnnnnnnnnnnnnnnnnnnnnnnnnnnnnnnnnnnnnnnnnnnnnnnnnnnnnnnnnnnnnnnnnnnnnnnnnnnnnnnnnnnnnnnnnnnnnnnnnnnnnnnnnnnnnnnnnnnnnnnnnnnnnnnnnnnnnnnnnnnnnnnnnnnnnnnnnnnnnnnnnnnnnnnnnnnnnnnnnnnnnnnnnnnnnnnnnnnnnnnnnnnnnnnnnnnnnnnnnnnnnnnnnnnnnnnnnnnnnnnnnnnnnnnnnnnnnnnnnnnnnnnnnnnnnnnnnnnnnnnnnnnnnnnnnnnnnnnnnnnnnnnnnnnnnnnnnnnnnnnnnnnnnnnnnnnnnnnnnnnnnnnnnnnnnnnnnnnnnnnnnnnnnnnnnnnnnnnnnnnnnnnnnnnnnnnnnnnnnnnnnnnnnnnnnnnnnnnnnnnnnnnnnnnnnnnnnnnnnnnnnnnnnnnnnnnnnnnnnnnnnnnnnnnnnnnnnnnnnnnnnnnnnnnnnnnnnnnnnnnnnnnnnnnnnnnnnnnnnnnnnnnnnnnnnnnnnnnnnnnnnnnnnnnnnnnnnnnnnnnnnnnnnnnnnnnnnnnnnnnnnnnnnnnnnnnnnnnnnnnnnnnnnnnnnnnnnnnnnnnnnnnnnnnnnnnnnnnnnnnnnnnnnnnnnnnnnnnnnnnnnnnnnnnnnnnnnnnnnnnnnnnnnnnnnnnnnnnnnnnnnnnnnnnnnnnnnnnnnnnnnnnnnnnnnnnnnnnnnnnnnnnnnnnnnnnnnnnnnnnnnnnnnnnnnnnnnnnnnnnnnnnnnnnnnnnnnnnnnnnnnnnnnnnnnnnnnnnnnnnnnnnnnnnnnnnnnnnnnnnnnnnnnnnnnnnnnnnnnnnnnnnnnnnnnnnnnnnnnnnnnnnnnnnnnnnnnnnnnnnnnnnnnnnnnnnnnnnnnnnnnnnnnnnnnnnnnnnnnnnnnnnnnnnnnnnnnnnnnnnnnnnnnnnnnnnnnnnnnnnnnnnnnnnnnnnnnnnnnnnnnnnnnnnnnnnnnnnnnnnnnnnnnnnnnnnnnnnnnnnnnnnnnnnnnnnnnnnnnnnnnnnnnnnnnnnnnnnnnnnnnnnnnnnnnnnnnnnnnnnnnnnnnnnnnnnnnnnnnnnnnnnnnnnnnnnnnnnnnnnnnnnnnnnnnnnnnnnnnnnnnnnnnnnnnnnnnnnnnnnnnnnnnnnnnnnnnnnnnnnnnnnnnnnnnnnnnnnnnnnnnnnnnnnnnnnnnnnnnnnnnnnnnnnnnnnnnnnnnnnnnnnnnnnnnnnnnnnnnnnnnnnnnnnnnnnnnnnnnnnnnnnnnnnnnnnnnnnnnnnnnnnnnnnnnnnnnnnnnnnnnnnnnnnnnnnnnnnnnnnnnnnnnnnnnnnnnnnnnnnnnnnnnnnnnnnnnnnnnnnnnnnnnnnnnnnnnnnnnnnnnnnnnnnnnnnnnnnnnnnnnnnnnnnnnnnnnnnnnnnnnnnnnnnnnnnnnnnnnnnnnnnnnnnnnnnnnnnnnnnnnnnnnnnnnnnnnnnnnnnnnnnnnnnnnnnnnnnnnnnnnnnnnnnnnnnnnnnnnnnnnnnnnnnnnnnnnnnnnnnnnnnnnnnnnnnnnnnnnnnnnnnnnnnnnnnnnnnnnnnnnnnnnnnnnnnnnnnnnnnnnnnnnnnnnnnnnnnnnnnnnnnnnnnnnnnnnnnnnnnnnnnnnnnnnnnnnnnnnnnnnnnnnnnnnnnnnnnnnnnnnnnnnnnnnnnnnnnnnnnnnnnnnnnnnnnnnnnnnnnnnnnnnnnnnnnnnnnnnnnnnnnnnnnnnnnnnnnnnnnnnnnnnnnnnnnnnnnnnnnnnnnnnnnnnnnnnnnnnnnnnnnnnnnnnnnnnnnnnnnnnnnnnnnnnnnnnnnnnnnnnnnnnnnnnnnnnnnnnnnnnnnnnnnnnnnnnnnnnnnnnnnnnnnnnnnnnnnnnnnnnnnnnnnnnnnnnnnnnnnnnnnnnnnnnnnnnnnnnnnnnnnnnnnnnnnnnnnnnnnnnnnnnnnnnnnnnnnnnnnnnnnnnnnnnnnnnnnnnnnnnnnnnnnnnnnnnnnnnnnnnnnnnnnnnnnnnnnnnnnnnnnnnnnnnnnnnnnnnnnnnnnnnnnnnnnnnnnnnnnnnnnnnnnnnnnnnnnnnnnnnnnnnnnnnnnnnnnnnnnnnnnnnnnnnnnnnnnnnnnnnnnnnnnnnnnnnnnnnnnnnnnnnnnnnnnnnnnnnnnnnnnnnnnnnnnnnnnnnnnnnnnnnnnnnnnnnnnnnnnnnnnnnnnnnnnnnnnnnnnnnnnnnnnnnnnnnnnnnnnnnnnnnnnnnnnnnnnnnnnnnnnnnnnnnnnnnnnnnnnnnnnnnnnnnnnnnnnnnnnnnnnnnnnnnnnnnnnnnnnnnnnnnnnnnnnnnnnnnnnnnnnnnnnnnnnnnnnnnnnnnnnnnnnnnnnnnnnnnnnnnnnnnnnnnnnnnnnnnnnnnnnnnnnnnnnnnnnnnnnnnnnnnnnnnnnnnnnnnnnnnnnnnnnnnnnnnnnnnnnnnnnnnnnnnnnnnnnnnnnnnnnnnnnnnnnnnnnnnnnnnnnnnnnnnnnnnnnnnnnnnnnnnnnnnnnnnnnnnnnnnnnnnnnnnnnnnnnnnnnnnnnnnnnnnnnnnnnnnnnnnnnnnnnnnnnnnnnnnnnnnnnnnnnnnnnnnnnnnnnnnnnnnnnnnnnnnnnnnnnnnnnnnnnnnnnnnnnnnnnnnnnnnnnnnnnnnnnnnnnnnnnnnnnnnnnnnnnnnnnnnnnnnnnnnnnnnnnnnnnnnnnnnnnnnnnnnnnnnnnnnnnnnnnnnnnnnnnnnnnnnnnnnnnnnnnnnnnnnnnnnnnnnnnnnnnnnnnnnnnnnnnnnnnnnnnnnnnnnnnnnnnnnnnnnnnnnnnnnnnnnnnnnnnnnnnnnnnnnnnnnnnnnnnnnnnnnnnnnnnnnnnnnnnnnnnnnnnnnnnnnnnnnnnnnnnnnnnnnnnnnnnnnnnnnnnnnnnnnnnnnnnnnnnnnnnnnnnnnnnnnnnnnnnnnnnnnnnnnnnnnnnnnnnnnnnnnnnnnnnnnnnnnnnnnnnnnnnnnnnnnnnnnnnnnnnnnnnnnnnnnnnnnnnnnnnnnnnnnnnnnnnnnnnnnnnnnnnnnnnnnnnnnnnnnnnnnnnnnnnnnnnnnnnnnnnnnnnnnnnnnnnnnnnnnnnnnnnnnnnnnnnnnnnnnnnnnnnnnnnnnnnnnnnnnnnnnnnnnnnnnnnnnnnnnnnnnnnnnnnnnnnnnnnnnnnnnnnnnnnnnnnnnnnnnnnnnnnnnnnnnnnnnnnnnnnnnnnnnnnnnnnnnnnnnnnnnnnnnnnnnnnnnnnnnnnnnnnnnnnnnnnnnnnnnnnnnnnnnnnnnnnnnnnnnnnnnnnnnnnnnnnnnnnnnnnnnnnnnnnnnnnnnnnnnnnnnnnnnnnnnnnnnnnnnnnnnnnnnnnnnnnnnnnnnnnnnnnnnnnnnnnnnnnnnnnnnnnnnnnnnnnnnnnnnnnnnnnnnnnnnnnnnnnnnnnnnnnnnnnnnnnnnnnnnnnnnnnnnnnnnnnnnnnnnnnnnnnnnnnnnnnnnnnnnnnnnnnnnnnnnnnnnnnnnnnnnnnnnnnnnnnnnnnnnnnnnnnnnnnnnnnnnnnnnnnnnnnnnnnnnnnnnnnnnnnnnnnnnnnnnnnnnnnnnnnnnnnnnnnnnnnnnnnnnnnnnnnnnnnnnnnnnnnnnnnnnnnnnnnnnnnnnnnnnnnnnnnnnnnnnnnnnnnnnnnnnnnnnnnnnnnnnnnnnnnnnnnnnnnnnnnnnnnnnnnnnnnnnnnnnnnnnnnnnnnnnnnnnnnnnnnnnnnnnnnnnnnnnnnnnnnnnnnnnnnnnnnnnnnnnnnnnnnnnnnnnnnnnnnnnnnnnnnnnnnnnnnnnnnnnnnnnnnnnnnnnnnnnnnnnnnnnnnnnnnnnnnnnnnnnnnnnnnnnnnnnnnnnnnnnnnnnnnnnnnnnnnnnnnnnnnnnnnnnnnnnnnnnnnnnnnnnnnnnnnnnnnnnnnnnnnnnnnnnnnnnnnnnnnnnnnnnnnnnnnnnnnnnnnnnnnnnnnnnnnnnnnnnnnnnnnnnnnnnnnnnnnnnnnnnnnnnnnnnnnnnnnnnnnnnnnnnnnnnnnnnnnnnnnnnnnnnnnnnnnnnnnnnnnnnnnnnnnnnnnnnnnnnnnnnnnnnnnnnnnnnnnnnnnnnnnnnnnnnnnnnnnnnnnnnnnnnnnnnnnnnnnnnnnnnnnnnnnnnnnnnnnnnnnnnnnnnnnnnnnnnnnnnnnnnnnnnnnnnnnnnnnnnnnnnnnnnnnnnnnnnnnnnnnnnnnnnnnnnnnnnnnnnnnnnnnnnnnnnnnnnnnnnnnnnnnnnnnnnnnnnnnnnnnnnnnnnnnnnnnnnnnnnnnnnnnnnnnnnnnnnnnnnnnnnnnnnnnnnnnnnnnnnnnnnnnnnnnnnnnnnnnnnnnnnnnnnnnnnnnnnnnnnnnnnnnnnnnnnnnnnnnnnnnnnnnnnnnnnnnnnnnnnnnnnnnnnnnnnnnnnnnnnnnnnnnnnnnnnnnnnnnnnnnnnnnnnnnnnnnnnnnnnnnnnnnnnnnnnnnnnnnnnnnnnnnnnnnnnnnnnnnnnnnnnnnnnnnnnnnnnnnnnnnnnnnnnnnnnnnnnnnnnnnnnnnnnnnnnnnnnnnnnnnnnnnnnnnnnnnnnnnnnnnnnnnnnnnnnnnnnnnnnnnnnnnnnnnnnnnnnnnnnnnnnnnnnnnnnnnnnnnnnnnnnnnnnnnnnnnnnnnnnnnnnnnnnnnnnnnnnnnnnnnnnnnnnnnnnnnnnnnnnnnnnnnnnnnnnnnnnnnnnnnnnnnnnnnnnnnnnnnnnnnnnnnnnnnnnnnnnnnnnnnnnnnnnnnnnnnnnnnnnnnnnnnnnnnnnnnnnnnnnnnnnnnnnnnnnnnnnnnnnnnnnnnnnnnnnnnnnnnnnnnnnnnnnnnnnnnnnnnnnnnnnnnnnnnnnnnnnnnnnnnnnnnnnnnnnnnnnnnnnnnnnnnnnnnnnnnnnnnnnnnnnnnnnnnnnnnnnnnnnnnnnnnnnnnnnnnnnnnnnnnnnnnnnnnnnnnnnnnnnnnnnnnnnnnnnnnnnnnnnnnnnnnnnnnnnnnnnnnnnnnnnnnnnnnnnnnnnnnnnnnnnnnnnnnnnnnnnnnnnnnnnnnnnnnnnnnnnnnnnnnnnnnnnnnnnnnnnnnnnnnnnnnnnnnnnnnnnnnnnnnnnnnnnnnnnnnnnnnnnnnnnnnnnnnnnnnnnnnnnnnnnnnnnnnnnnnnnnnnnnnnnnnnnnnnnnnnnnnnnnnnnnnnnnnnnnnnnnnnnnnnnnnnnnnnnnnnnnnnnnnnnnnnnnnnnnnnnnnnnnnnnnnnnnnnnnnnnnnnnnnnnnnnnnnnnnnnnnnnnnnnnnnnnnnnnnnnnnnnnnnnnnnnnnnnnnnnnnnnnnnnnnnnnnnnnnnnnnnnnnnnnnnnnnnnnnnnnnnnnnnnnnnnnnnnnnnnnnnnnnnnnnnnnnnnnnnnnnnnnnnnnnnnnnnnnnnnnnnnnnnnnnnnnnnnnnnnnnnnnnnnnnnnnnnnnnnnnnnnnnnnnnnnnnnnnnnnnnnnnnnnnnnnnnnnnnnnnnnnnnnnnnnnnnnnnnnnnnnnnnnnnnnnnnnnnnnnnnnnnnnnnnnnnnnnnnnnnnnnnnnnnnnnnnnnnnnnnnnnnnnnnnnnnnnnnnnnnnnnnnnnnnnnnnnnnnnnnnnnnnnnnnnnnnnnnnnnnnnnnnnnnnnnnnnnnnnnnnnnnnnnnnnnnnnnnnnnnnnnnnnnnnnnnnnnnnnnnnnnnnnnnnnnnnnnnnnnnnnnnnnnnnnnnnnnnnnnnnnnnnnnnnnnnnnnnnnnnnnnnnnnnnnnnnnnnnnnnnnnnnnnnnnnnnnnnnnnnnnnnnnnnnnnnnnnnnnnnnnnnnnnnnnnnnnnnnnnnnnnnnnnnnnnnnnnnnnnnnnnnnnnnnnnnnnnnnnnnnnnnnnnnnnnnnnnnnnnnnnnnnnnnnnnnnnnnnnnnnnnnnnnnnnnnnnnnnnnnnnnnnnnnnnnnnnnnnnnnnnnnnnnnnnnnnnnnnnnnnnnnnnnnnnnnnnnnnnnnnnnnnnnnnnnnnnnnnnnnnnnnnnnnnnnnnnnnnnnnnnnnnnnnnnnnnnnnnnnnnnnnnnnnnnnnnnnnnnnnnnnnnnnnnnnnnnnnnnnnnnnnnnnnnnnnnnnnnnnnnnnnnnnnnnnnnnnnnnnnnnnnnnnnnnnnnnnnnnnnnnnnnnnnnnnnnnnnnnnnnnnnnnnnnnnnnnnnnnnnnnnnnnnnnnnnnnnnnnnnnnnnnnnnnnnnnnnnnnnnnnnnnnnnnnnnnnnnnnnnnnnnnnnnnnnnnnnnnnnnnnnnnnnnnnnnnnnnnnnnnnnnnnnnnnnnnnnnnnnnnnnnnnnnnnnnnnnnnnnnnnnnnnnnnnnnnnnnnnnnnnnnnnnnnnnnnnnnnnnnnnnnnnnnnnnnnnnnnnnnnnnnnnnnnnnnnnnnnnnnnnnnnnnnnnnnnnnnnnnnnnnnnnnnnnnnnnnnnnnnnnnnnnnnnnnnnnnnnnnnnnnnnnnnnnnnnnnnnnnnnnnnnnnnnnnnnnnnnnnnnnnnnnnnnnnnnnnnnnnnnnnnnnnnnnnnnnnnnnnnnnnnnnnnnnnnnnnnnnnnnnnnnnnnnnnnnnnnnnnnnnnnnnnnnnnnnnnnnnnnnnnnnnnnnnnnnnnnnnnnnnnnnnnnnnnnnnnnnnnnnnnnnnnnnnnnnnnnnnnnnnnnnnnnnnnnnnnnnnnnnnnnnnnnnnnnnnnnnnnnnnnnnnnnnnnnnnnnnnnnnnnnnnnnnnnnnnnnnnnnnnnnnnnnnnnnnnnnnnnnnnnnnnnnnnnnnnnnnnnnnnnnnnnnnnnnnnnnnnnnnnnnnnnnnnnnnnnnnnnnnnnnnnnnnnnnnnnnnnnnnnnnnnnnnnnnnnnnnnnnnnnnnnnnnnnnnnnnnnnnnnnnnnnnnnnnnnnnnnnnnnnnnnnnnnnnnnnnnnnnnnnnnnnnnnnnnnnnnnnnnnnnnnnnnnnnnnnnnnnnnnnnnnnnnnnnnnnnnnnnnnnnnnnnnnnnnnnnnnnnnnnnnnnnnnnnnnnnnnnnnnnnnnnnnnnnnnnnnnnnnnnnnnnnnnnnnnnnnnnnnnnnnnnnnnnnnnnnnnnnnnnnnnnnnnnnnnnnnnnnnnnnnnnnnnnnnnnnnnnnnnnnnnnnnnnnnnnnnnnnnnnnnnnnnnnnnnnnnnnnnnnnnnnnnnnnnnnnnnnnnnnnnnnnnnnnnnnnnnnnnnnnnnnnnnnnnnnnnnnnnnnnnnnnnnnnnnnnnnnnnnnnnnnnnnnnnnnnnnnnnnnnnnnnnnnnnnnnnnnnnnnnnnnnnnnnnnnnnnnnnnnnnnnnnnnnnnnnnnnnnnnnnnnnnnnnnnnnnnnnnnnnnnnnnnnnnnnnnnnnnnnnnnnnnnnnnnnnnnnnnnnnnnnnnnnnnnnnnnnnnnnnnnnnnnnnnnnnnnnnnnnnnnnnnnnnnnnnnnnnnnnnnnnnnnnnnnnnnnnnnnnnnnnnnnnnnnnnnnnnnnnnnnnnnnnnnnnnnnnnnnnnnnnnnnnnnnnnnnnnnnnnnnnnnnnnnnnnnnnnnnnnnnnnnnnnnnnnnnnnnnnnnnnnnnnnnnnnnnnnnnnnnnnnnnnnnnnnnnnnnnnnnnnnnnnnnnnnnnnnnnnnnnnnnnnnnnnnnnnnnnnnnnnnnnnnnnnnnnnnnnnnnnnnnnnnnnnnnnnnnnnnnnnnnnnnnnnnnnnnnnnnnnnnnnnnnnnnnnnnnnnnnnnnnnnnnnnnnnnnnnnnnnnnnnnnnnnnnnnnnnnnnnnnnnnnnnnnnnnnnnnnnnnnnnnnnnnnnnnnnnnnnnnnnnnnnnnnnnnnnnnnnnnnnnnnnnnnnnnnnnnnnnnnnnnnnnnnnnnnnnnnnnnnnnnnnnnnnnnnnnnnnnnnnnnnnnnnnnnnnnnnnnnnnnnnnnnnnnnnnnnnnnnnnnnnnnnnnnnnnnnnnnnnnnnnnnnnnnnnnnnnnnnnnnnnnnnnnnnnnnnnnnnnnnnnnnnnnnnnnnnnnnnnnnnnnnnnnnnnnnnnnnnnnnnnnnnnnnnnnnnnnnnnnnnnnnnnnnnnnnnnnnnnnnnnnnnnnnnnnnnnnnnnnnnnnnnnnnnnnnnnnnnnnnnnnnnnnnnnnnnnnnnnnnnnnnnnnnnnnnnnnnnnnnnnnnnnnnnnnnnnnnnnnnnnnnnnnnnnnnnnnnnnnnnnnnnnnnnnnnnnnnnnnnnnnnnnnnnnnnnnnnnnnnnnnnnnnnnnnnnnnnnnnnnnnnnnnnnnnnnnnnnnnnnnnnnnnnnnnnnnnnnnnnnnnnnnnnnnnnnnnnnnnnnnnnnnnnnnnnnnnnnnnnnnnnnnnnnnnnnnnnnnnnnnnnnnnnnnnnnnnnnnnnnnnnnnnnnnnnnnnnnnnnnnnnnnnnnnnnnnnnnnnnnnnnnnnnnnnnnnnnnnnnnnnnnnnnnnnnnnnnnnnnnnnnnnnnnnnnnnnnnnnnnnnnnnnnnnnnnnnnnnnnnnnnnnnnnnnnnnnnnnnnnnnnnnnnnnnnnnnnnnnnnnnnnnnnnnnnnnnnnnnnnnnnnnnnnnnnnnnnnnnnnnnnnnnnnnnnnnnnnnnnnnnnnnnnnnnnnnnnnnnnnnnnnnnnnnnnnnnnnnnnnnnnnnnnnnnnnnnnnnnnnnnnnnnnnnnnnnnnnnnnnnnnnnnnnnnnnnnnnnnnnnnnnnnnnnnnnnnnnnnnnnnnnnnnnnnnnnnnnnnnnnnnnnnnnnnnnnnnnnnnnnnnnnnnnnnnnnnnnnnnnnnnnnnnnnnnnnnnnnnnnnnnnnnnnnnnnnnnnnnnnnnnnnnnnnnnnnnnnnnnnnnnnnnnnnnnnnnnnnnnnnnnnnnnnnnnnnnnnnnnnnnnnnnnnnnnnnnnnnnnnnnnnnnnnnnnnnnnnnnnnnnnnnnnnnnnnnnnnnnnnnnnnnnnnnnnnnnnnnnnnnnnnnnnnnnnnnnnnnnnnnnnnnnnnnnnnnnnnnnnnnnnnnnnnnnnnnnnnnnnnnnnnnnnnnnnnnnnnnnnnnnnnnnnnnnnnnnnnnnnnnnnnnnnnnnnnnnnnnnnnnnnnnnnnnnnnnnnnnnnnnnnnnnnnnnnnnnnnnnnnnnnnnnnnnnnnnnnnnnnnnnnnnnnnnnnnnnnnnnnnnnnnnnnnnnnnnnnnnnnnnnnnnnnnnnnnnnnnnnnnnnnnnnnnnnnnnnnnnnnnnnnnnnnnnnnnnnnnnnnnnnnnnnnnnnnnnnnnnnnnnnnnnnnnnnnnnnnnnnnnnnnnnnnnnnnnnnnnnnnnnnnnnnnnnnnnnnnnnnnnnnnnnnnnnnnnnnnnnnnnnnnnnnnnnnnnnnnnnnnnnnnnnnnnnnnnnnnnnnnnnnnnnnnnnnnnnnnnnnnnnnnnnnnnnnnnnnnnnnnnnnnnnnnnnnnnnnnnnnnnnnnnnnnnnnnnnnnnnnnnnnnnnnnnnnnnnnnnnnnnnnnnnnnnnnnnnnnnnnnnnnnnnnnnnnnnnnnnnnnnnnnnnnnnnnnnnnnnnnnnnnnnnnnnnnnnnnnnnnnnnnnnnnnnnnnnnnnnnnnnnnnnnnnnnnnnnnnnnnnnnnnnnnnnnnnnnnnnnnnnnnnnnnnnnnnnnnnnnnnnnnnnnnnnnnnnnnnnnnnnnnnnnnnnnnnnnnnnnnnnnnnnnnnnnnnnnnnnnnnnnnnnnnnnnnnnnnnnnnnnnnnnnnnnnnnnnnnnnnnnnnnnnnnnnnnnnnnnnnnnnnnnnnnnnnnnnnnnnnnnnnnnnnnnnnnnnnnnnnnnnnnnnnnnnnnnnnnnnnnnnnnnnnnnnnnnnnnnnnnnnnnnnnnnnnnnnnnnnnnnnnnnnnnnnnnnnnnnnnnnnnnnnnnnnnnnnnnnnnnnnnnnnnnnnnnnnnnnnnnnnnnnnnnnnnnnnnnnnnnnnnnnnnnnnnnnnnnnnnnnnnnnnnnnnnnnnnnnnnnnnnnnnnnnnnnnnnnnnnnnnnnnnnnnnnnnnnnnnnnnnnnnnnnnnnnnnnnnnnnnnnnnnnnnnnnnnnnnnnnnnnnnnnnnnnnnnnnnnnnnnnnnnnnnnnnnnnnnnnnnnnnnnnnnnnnnnnnnnnnnnnnnnnnnnnnnnnnnnnnnnnnnnnnnnnnnnnnnnnnnnnnnnnnnnnnnnnnnnnnnnnnnnnnnnnnnnnnnnnnnnnnnnnnnnnnnnnnnnnnnnnnnnnnnnnnnnnnnnnnnnnnnnnnnnnnnnnnnnnnnnnnnnnnnnnnnnnnnnnnnnnnnnnnnnnnnnnnnnnnnnnnnnnnnnnnnnnnnnnnnnnnnnnnnnnnnnnnnnnnnnnnnnnnnnnnnnnnnnnnnnnnnnnnnnnnnnnnnnnnnnnnnnnnnnnnnnnnnnnnnnnnnnnnnnnnnnnnnnnnnnnnnnnnnnnnnnnnnnnnnnnnnnnnnnnnnnnnnnnnnnnnnnnnnnnnnnnnnnnnnnnnnnnnnnnnnnnnnnnnnnnnnnnnnnnnnnnnnnnnnnnnnnnnnnnnnnnnnnnnnnnnnnnnnnnnnnnnnnnnnnnnnnnnnnnnnnnnnnnnnnnnnnnnnnnnnnnnnnnnnnnnnnnnnnnnnnnnnnnnnnnnnnnnnnnnnnnnnnnnnnnnnnnnnnnnnnnnnnnnnnnnnnnnnnnnnnnnnnnnnnnnnnnnnnnnnnnnnnnnnnnnnnnnnnnnnnnnnnnnnnnnnnnnnnnnnnnnnnnnnnnnnnnnnnnnnnnnnnnnnnnnnnnnnnnnnnnnnnnnnnnnnnnnnnnnnnnnnnnnnnnnnnnnnnnnnnnnnnnnnnnnnnnnnnnnnnnnnnnnnnnnnnnnnnnnnnnnnnnnnnnnnnnnnnnnnnnnnnnnnnnnnnnnnnnnnnnnnnnnnnnnnnnnnnnnnnnnnnnnnnnnnnnnnnnnnnnnnnnnnnnnnnnnnnnnnnnnnnnnnnnnnnnnnnnnnnnnnnnnnnnnnnnnnnnnnnnnnnnnnnnnnnnnnnnnnnnnnnnnnnnnnnnnnnnnnnnnnnnnnnnnnnnnnnnnnnnnnnnnnnnnnnnnnnnnnnnnnnnnnnnnnnnnnnnnnnnnnnnnnnnnnnnnnnnnnnnnnnnnnnnnnnnnnnnnnnnnnnnnnnnnnnnnnnnnnnnnnnnnnnnnnnnnnnnnnnnnnnnnnnnnnnnnnnnnnnnnnnnnnnnnnnnnnnnnnnnnnnnnnnnnnnnnnnnnnnnnnnnnnnnnnnnnnnnnnnnnnnnnnnnnnnnnnnnnnnnnnnnnnnnnnnnnnnnnnnnnnnnnnnnnnnnnnnnnnnnnnnnnnnnnnnnnnnnnnnnnnnnnnnnnnnnnnnnnnnnnnnnnnnnnnnnnnnnnnnnnnnnnnnnnnnnnnnnnnnnnnnnnnnnnnnnnnnnnnnnnnnnnnnnnnnnnnnnnnnnnnnnnnnnnnnnnnnnnnnnnnnnnnnnnnnnnnnnnnnnnnnnnnnnnnnnnnnnnnnnnnnnnnnnnnnnnnnnnnnnnnnnnnnnnnnnnnnnnnnnnnnnnnnnnnnnnnnnnnnnnnnnnnnnnnnnnnnnnnnnnnnnnnnnnnnnnnnnnnnnnnnnnnnnnnnnnnnnnnnnnnnnnnnnnnnnnnnnnnnnnnnnnnnnnnnnnnnnnnnnnnnnnnnnnnnnnnnnnnnnnnnnnnnnnnnnnnnnnnnnnnnnnnnnnnnnnnnnnnnnnnnnnnnnnnnnnnnnnnnnnnnnnnnnnnnnnnnnnnnnnnnnnnnnnnnnnnnnnnnnnnnnnnnnnnnnnnnnnnnnnnnnnnnnnnnnnnnnnnnnnnnnnnnnnnnnnnnnnnnnnnnnnnnnnnnnnnnnnnnnnnnnnnnnnnnnnnnnnnnnnnnnnnnnnnnnnnnnnnnnnnnnnnnnnnnnnnnnnnnnnnnnnnnnnnnnnnnnnnnnnnnnnnnnnnnnnnnnnnnnnnnnnnnnnnnnnnnnnnnnnnnnnnnnnnnnnnnnnnnnnnnnnnnnnnnnnnnnnnnnnnnnnnnnnnnnnnnnnnnnnnnnnnnnnnnnnnnnnnnnnnnnnnnnnnnnnnnnnnnnnnnnnnnnnnnnnnnnnnnnnnnnnnnnnnnnnnnnnnnnnnnnnnnnnnnnnnnnnnnnnnnnnnnnnnnnnnnnnnnnnnnnnnnnnnnnnnnnnnnnnnnnnnnnnnnnnnnnnnnnnnnnnnnnnnnnnnnnnnnnnnnnnnnnnnnnnnnnnnnnnnnnnnnnnnnnnnnnnnnnnnnnnnnnnnnnnnnnnnnnnnnnnnnnnnnnnnnnnnnnnnnnnnnnnnnnnnnnnnnnnnnnnnnnnnnnnnnnnnnnnnnnnnnnnnnnnnnnnnnnnnnnnnnnnnnnnnnnnnnnnnnnnnnnnnnnnnnnnnnnnnnnnnnnnnnnnnnnnnnnnnnnnnnnnnnnnnnnnnnnnnnnnnnnnnnnnnnnnnnnnnnnnnnnnnnnnnnnnnnnnnnnnnnnnnnnnnnnnnnnnnnnnnnnnnnnnnnnnnnnnnnnnnnnnnnnnnnnnnnnnnnnnnnnnnnnnnnnnnnnnnnnnnnnnnnnnnnnnnnnnnnnnnnnnnnnnnnnnnnnnnnnnnnnnnnnnnnnnnnnnnnnnnnnnnnnnnnnnnnnnnnnnnnnnnnnnnnnnnnnnnnnnnnnnnnnnnnnnnnnnnnnnnnnnnnnnnnnnnnnnnnnnnnnnnnnnnnnnnnnnnnnnnnnnnnnnnnnnnnnnnnnnnnnnnnnnnnnnnnnnnnnnnnnnnnnnnnnnnnnnnnnnnnnnnnnnnnnnnnnnnnnnnnnnnnnnnnnnnnnnnnnnnnnnnnnnnnnnnnnnnnnnnnnnnnnnnnnnnnnnnnnnnnnnnnnnnnnnnnnnnnnnnnnnnnnnnnnnnnnnnnnnnnnnnnnnnnnnnnnnnnnnnnnnnnnnnnnnnnnnnnnnnnnnnnnnnnnnnnnnnnnnnnnnnnnnnnnnnnnnnnnnnnnnnnnnnnnnnnnnnnnnnnnnnnnnnnnnnnnnnnnnnnnnnnnnnnnnnnnnnnnnnnnnnnnnnnnnnnnnnnnnnnnnnnnnnnnnnnnnnnnnnnnnnnnnnnnnnnnnnnnnnnnnnnnnnnnnnnnnnnnnnnnnnnnnnnnnnnnnnnnnnnnnnnnnnnnnnnnnnnnnnnnnnnnnnnnnnnnnnnnnnnnnnnnnnnnnnnnnnnnnnnnnnnnnnnnnnnnnnnnnnnnnnnnnnnnnnnnnnnnnnnnnnnnnnnnnnnnnnnnnnnnnnnnnnnnnnnnnnnnnnnnnnnnnnnnnnnnnnnnnnnnnnnnnnnnnnnnnnnnnnnnnnnnnnnnnnnnnnnnnnnnnnnnnnnnnnnnnnnnnnnnnnnnnnnnnnnnnnnnnnnnnnnnnnnnnnnnnnnnnnnnnnnnnnnnnnnnnnnnnnnnnnnnnnnnnnnnnnnnnnnnnnnnnnnnnnnnnnnnnnnnnnnnnnnnnnnnnnnnnnnnnnnnnnnnnnnnnnnnnnnnnnnnnnnnnnnnnnnnnnnnnnnnnnnnnnnnnnnnnnnnnnnnnnnnnnnnnnnnnnnnnnnnnnnnnnnnnnnnnnnnnnnnnnnnnnnnnnnnnnnnnnnnnnnnnnnnnnnnnnnnnnnnnnnnnnnnnnnnnnnnnnnnnnnnnnnnnnnnnnnnnnnnnnnnnnnnnnnnnnnnnnnnnnnnnnnnnnnnnnnnnnnnnnnnnnnnnnnnnnnnnnnnnnnnnnnnnnnnnnnnnnnnnnnnnnnnnnnnnnnnnnnnnnnnnnnnnnnnnnnnnnnnnnnnnnnnnnnnnnnnnnnnnnnnnnnnnnnnnnnnnnnnnnnnnnnnnnnnnnnnnnnnnnnnnnnnnnnnnnnnnnnnnnnnnnnnnnnnnnnnnnnnnnnnnnnnnnnnnnnnnnnnnnnnnnnnnnnnnnnnnnnnnnnnnnnnnnnnnnnnnnnnnnnnnnnnnnnnnnnnnnnnnnnnnnnnnnnnnnnnnnnnnnnnnnnnnnnnnnnnnnnnnnnnnnnnnnnnnnnnnnnnnnnnnnnnnnnnnnnnnnnnnnnnnnnnnnnnnnnnnnnnnnnnnnnnnnnnnnnnnnnnnnnnnnnnnnnnnnnnnnnnnnnnnnnnnnnnnnnnnnnnnnnnnnnnnnnnnnnnnnnnnnnnnnnnnnnnnnnnnnnnnnnnnnnnnnnnnnnnnnnnnnnnnnnnnnnnnnnnnnnnnnnnnnnnnnnnnnnnnnnnnnnnnnnnnnnnnnnnnnnnnnnnnnnnnnnnnnnnnnnnnnnnnnnnnnnnnnnnnnnnnnnnnnnnnnnnnnnnnnnnnnnnnnnnnnnnnnnnnnnnnnnnnnnnnnnnnnnnnnnnnnnnnnnnnnnnnnnnnnnnnnnnnnnnnnnnnnnnnnnnnnnnnnnnnnnnnnnnnnnnnnnnnnnnnnnnnnnnnnnnnnnnnnnnnnnnnnnnnnnnnnnnnnnnnnnnnnnnnnnnnnnnnnnnnnnnnnnnnnnnnnnnnnnnnnnnnnnnnnnnnnnnnnnnnnnnnnnnnnnnnnnnnnnnnnnnnnnnnnnnnnnnnnnnnnnnnnnnnnnnnnnnnnnnnnnnnnnnnnnnnnnnnnnnnnnnnnnnnnnnnnnnnnnnnnnnnnnnnnnnnnnnnnnnnnnnnnnnnnnnnnnnnnnnnnnnnnnnnnnnnnnnnnnnnnnnnnnnnnnnnnnnnnnnnnnnnnnnnnnnnnnnnnnnnnnnnnnnnnnnnnnnnnnnnnnnnnnnnnnnnnnnnnnnnnnnnnnnnnnnnnnnnnnnnnnnnnnnnnnnnnnnnnnnnnnnnnnnnnnnnnnnnnnnnnnnnnnnnnnnnnnnnnnnnnnnnnnnnnnnnnnnnnnnnnnnnnnnnnnnnnnnnnnnnnnnnnnnnnnnnnnnnnnnnnnnnnnnnnnnnnnnnnnnnnnnnnnnnnnnnnnnnnnnnnnnnnnnnnnnnnnnnnnnnnnnnnnnnnnnnnnnnnnnnnnnnnnnnnnnnnnnnnnnnnnnnnnnnnnnnnnnnnnnnnnnnnnnnnnnnnnnnnnnnnnnnnnnnnnnnnnnnnnnnnnnnnnnnnnnnnnnnnnnnnnnnnnnnnnnnnnnnnnnnnnnnnnnnnnnnnnnnnnnnnnnnnnnnnnnnnnnnnnnnnnnnnnnnnnnnnnnnnnnnnnnnnnnnnnnnnnnnnnnnnnnnnnnnnnnnnnnnnnnnnnnnnnnnnnnnnnnnnnnnnnnnnnnnnnnnnnnnnnnnnnnnnnnnnnnnnnnnnnnnnnnnnnnnnnnnnnnnnnnnnnnnnnnnnnnnnnnnnnnnnnnnnnnnnnnnnnnnnnnnnnnnnnnnnnnnnnnnnnnnnnnnnnnnnnnnnnnnnnnnnnnnnnnnnnnnnnnnnnnnnnnnnnnnnnnnnnnnnnnnnnnnnnnnnnnnnnnnnnnnnnnnnnnnnnnnnnnnnnnnnnnnnnnnnnnnnnnnnnnnnnnnnnnnnnnnnnnnnnnnnnnnnnnnnnnnnnnnnnnnnnnnnnnnnnnnnnnnnnnnnnnnnnnnnnnnnnnnnnnnnnnnnnnnnnnnnnnnnnnnnnnnnnnnnnnnnnnnnnnnnnnnnnnnnnnnnnnnnnnnnnnnnnnnnnnnnnnnnnnnnnnnnnnnnnnnnnnnnnnnnnnnnnnnnnnnnnnnnnnnnnnnnnnnnnnnnnnnnnnnnnnnnnnnnnnnnnnnnnnnnnnnnnnnnnnnnnnnnnnnnnnnnnnnnnnnnnnnnnnnnnnnnnnnnnnnnnnnnnnnnnnnnnnnnnnnnnnnnnnnnnnnnnnnnnnnnnnnnnnnnnnnnnnnnnnnnnnnnnnnnnnnnnnnnnnnnnnnnnnnnnnnnnnnnnnnnnnnnnnnnnnnnnnnnnnnnnnnnnnnnnnnnnnnnnnnnnnnnnnnnnnnnnnnnnnnnnnnnnnnnnnnnnnnnnnnnnnnnnnnnnnnnnnnnnnnnnnnnnnnnnnnnnnnnnnnnnnnnnnnnnnnnnnnnnnnnnnnnnnnnnnnnnnnnnnnnnnnnnnnnnnnnnnnnnnnnnnnnnnnnnnnnnnnnnnnnnnnnnnnnnnnnnnnnnnnnnnnnnnnnnnnnnnnnnnnnnnnnnnnnnnnnnnnnnnnnnnnnnnnnnnnnnnnnnnnnnnnnnnnnnnnnnnnnnnnnnnnnnnnnnnnnnnnnnnnnnnnnnnnnnnnnnnnnnnnnnnnnnnnnnnnnnnnnnnnnnnnnnnnnnnnnnnnnnnnnnnnnnnnnnnnnnnnnnnnnnnnnnnnnnnnnnnnnnnnnnnnnnnnnnnnnnnnnnnnnnnnnnnnnnnnnnnnnnnnnnnnnnnnnnnnnnnnnnnnnnnnnnnnnnnnnnnnnnnnnnnnnnnnnnnnnnnnnnnnnnnnnnnnnnnnnnnnnnnnnnnnnnnnnnnnnnnnnnnnnnnnnnnnnnnnnnnnnnnnnnnnnnnnnnnnnnnnnnnnnnnnnnnnnnnnnnnnnnnnnnnnnnnnnnnnnnnnnnnnnnnnnnnnnnnnnnnnnnnnnnnnnnnnnnnnnnnnnnnnnnnnnnnnnnnnnnnnnnnnnnnnnnnnnnnnnnnnnnnnnnnnnnnnnnnnnnnnnnnnnnnnnnnnnnnnnnnnnnnnnnnnnnnnnnnnnnnnnnnnnnnnnnnnnnnnnnnnnnnnnnnnnnnnnnnnnnnnnnnnnnnnnnnnnnnnnnnnnnnnnnnnnnnnnnnnnnnnnnnnnnnnnnnnnnnnnnnnnnnnnnnnnnnnnnnnnnnnnnnnnnnnnnnnnnnnnnnnnnnnnnnnnnnnnnnnnnnnnnnnnnnnnnnnnnnnnnnnnnnnnnnnnnnnnnnnnnnnnnnnnnnnnnnnnnnnnnnnnnnnnnnnnnnnnnnnnnnnnnnnnnnnnnnnnnnnnnnnnnnnnnnnnnnnnnnnnnnnnnnnnnnnnnnnnnnnnnnnnnnnnnnnnnnnnnnnnnnnnnnnnnnnnnnnnnnnnnnnnnnnnnnnnnnnnnnnnnnnnnnnnnnnnnnnnnnnnnnnnnnnnnnnnnnnnnnnnnnnnnnnnnnnnnnnnnnnnnnnnnnnnnnnnnnnnnnnnnnnnnnnnnnnnnnnnnnnnnnnnnnnnnnnnnnnnnnnnnnnnnnnnnnnnnnnnnnnnnnnnnnnnnnnnnnnnnnnnnnnnnnnnnnnnnnnnnnnnnnnnnnnnnnnnnnnnnnnnnnnnnnnnnnnnnnnnnnnnnnnnnnnnnnnnnnnnnnnnnnnnnnnnnnnnnnnnnnnnnnnnnnnnnnnnnnnnnnnnnnnnnnnnnnnnnnnnnnnnnnnnnnnnnnnnnnnnnnnnnnnnnnnnnnnnnnnnnnnnnnnnnnnnnnnnnnnnnnnnnnnnnnnnnnnnnnnnnnnnnnnnnnnnnnnnnnnnnnnnnnnnnnnnnnnnnnnnnnnnnnnnnnnnnnnnnnnnnnnnnnnnnnnnnnnnnnnnnnnnnnnnnnnnnnnnnnnnnnnnnnnnnnnnnnnnnnnnnnnnnnnnnnnnnnnnnnnnnnnnnnnnnnnnnnnnnnnnnnnnnnnnnnnnnnnnnnnnnnnnnnnnnnnnnnnnnnnnnnnnnnnnnnnnnnnnnnnnnnnnnnnnnnnnnnnnnnnnnnnnnnnnnnnnnnnnnnnnnnnnnnnnnnnnnnnnnnnnnnnnnnnnnnnnnnnnnnnnnnnnnnnnnnnnnnnnnnnnnnnnnnnnnnnnnnnnnnnnnnnnnnnnnnnnnnnnnnnnnnnnnnnnnnnnnnnnnnnnnnnnnnnnnnnnnnnnnnnnnnnnnnnnnnnnnnnnnnnnnnnnnnnnnnnnnnnnnnnnnnnnnnnnnnnnnnnnnnnnnnnnnnnnnnnnnnnnnnnnnnnnnnnnnnnnnnnnnnnnnnnnnnnnnnnnnnnnnnnnnnnnnnnnnnnnnnnnnnnnnnnnnnnnnnnnnnnnnnnnnnnnnnnnnnnnnnnnnnnnnnnnnnnnnnnnnnnnnnnnnnnnnnnnnnnnnnnnnnnnnnnnnnnnnnnnnnnnnnnnnnnnnnnnnnnnnnnnnnnnnnnnnnnnnnnnnnnnnnnnnnnnnnnnnnnnnnnnnnnnnnnnnnnnnnnnnnnnnnnnnnnnnnnnnnnnnnnnnnnnnnnnnnnnnnnnnnnnnnnnnnnnnnnnnnnnnnnnnnnnnnnnnnnnnnnnnnnnnnnnnnnnnnnnnnnnnnnnnnnnnnnnnnnnnnnnnnnnnnnnnnnnnnnnnnnnnnnnnnnnnnnnnnnnnnnnnnnnnnnnnnnnnnnnnnnnnnnnnnnnnnnnnnnnnnnnnnnnnnnnnnnnnnnnnnnnnnnnnnnnnnnnnnnnnnnnnnnnnnnnnnnnnnnnnnnnnnnnnnnnnnnnnnnnnnnnnnnnnnnnnnnnnnnnnnnnnnnnnnnnnnnnnnnnnnnnnnnnnnnnnnnnnnnnnnnnnnnnnnnnnnnnnnnnnnnnnnnnnnnnnnnnnnnnnnnnnnnnnnnnnnnnnnnnnnnnnnnnnnnnnnnnnnnnnnnnnnnnnnnnnnnnnnnnnnnnnnnnnnnnnnnnnnnnnnnnnnnnnnnnnnnnnnnnnnnnnnnnnnnnnnnnnnnnnnnnnnnnnnnnnnnnnnnnnnnnnnnnnnnnnnnnnnnnnnnnnnnnnnnnnnnnnnnnnnnnnnnnnnnnnnnnnnnnnnnnnnnnnnnnnnnnnnnnnnnnnnnnnnnnnnnnnnnnnnnnnnnnnnnnnnnnnnnnnnnnnnnnnnnnnnnnnnnnnnnnnnnnnnnnnnnnnnnnnnnnnnnnnnnnnnnnnnnnnnnnnnnnnnnnnnnnnnnnnnnnnnnnnnnnnnnnnnnnnnnnnnnnnnnnnnnnnnnnnnnnnnnnnnnnnnnnnnnnnnnnnnnnnnnnnnnnnnnnnnnnnnnnnnnnnnnnnnnnnnnnnnnnnnnnnnnnnnnnnnnnnnnnnnnnnnnnnnnnnnnnnnnnnnnnnnnnnnnnnnnnnnnnnnnnnnnnnnnnnnnnnnnnnnnnnnnnnnnnnnnnnnnnnnnnnnnnnnnnnnnnnnnnnnnnnnnnnnnnnnnnnnnnnnnnnnnnnnnnnnnnnnnnnnnnnnnnnnnnnnnnnnnnnnnnnnnnnnnnnnnnnnnnnnnnnnnnnnnnnnnnnnnnnnnnnnnnnnnnnnnnnnnnnnnnnnnnnnnnnnnnnnnnnnnnnnnnnnnnnnnnnnnnnnnnnnnnnnnnnnnnnnnnnnnnnnnnnnnnnnnnnnnnnnnnnnnnnnnnnnnnnnnnnnnnnnnnnnnnnnnnnnnnnnnnnnnnnnnnnnnnnnnnnnnnnnnnnnnnnnnnnnnnnnnnnnnnnnnnnnnnnnnnnnnnnnnnnnnnnnnnnnnnnnnnnnnnnnnnnnnnnnnnnnnnnnnnnnnnnnnnnnnnnnnnnnnnnnnnnnnnnnnnnnnnnnnnnnnnnnnnnnnnnnnnnnnnnnnnnnnnnnnnnnnnnnnnnnnnnnnnnnnnnnnnnnnnnnnnnnnnnnnnnnnnnnnnnnnnnnnnnnnnnnnnnnnnnnnnnnnnnnnnnnnnnnnnnnnnnnnnnnnnnnnnnnnnnnnnnnnnnnnnnnnnnnnnnnnnnnnnnnnnnnnnnnnnnnnnnnnnnnnnnnnnnnnnnnnnnnnnnnnnnnnnnnnnnnnnnnnnnnnnnnnnnnnnnnnnnnnnnnnnnnnnnnnnnnnnnnnnnnnnnnnnnnnnnnnnnnnnnnnnnnnnnnnnnnnnnnnnnnnnnnnnnnnnnnnnnnnnnnnnnnnnnnnnnnnnnnnnnnnnnnnnnnnnnnnnnnnnnnnnnnnnnnnnnnnnnnnnnnnnnnnnnnnnnnnnnnnnnnnnnnnnnnnnnnnnnnnnnnnnnnnnnnnnnnnnnnnnnnnnnnnnnnnnnnnnnnnnnnnnnnnnnnnnnnnnnnnnnnnnnnnnnnnnnnnnnnnnnnnnnnnnnnnnnnnnnnnnnnnnnnnnnnnnnnnnnnnnnnnnnnnnnnnnnnnnnnnnnnnnnnnnnnnnnnnnnnnnnnnnnnnnnnnnnnnnnnnnnnnnnnnnnnnnnnnnnnnnnnnnnnnnnnnnnnnnnnnnnnnnnnnnnnnnnnnnnnnnnnnnnnnnnnnnnnnnnnnnnnnnnnnnnnnnnnnnnnnnnnnnnnnnnnnnnnnnnnnnnnnnnnnnnnnnnnnnnnnnnnnnnnnnnnnnnnnnnnnnnnnnnnnnnnnnnnnnnnnnnnnnnnnnnnnnnnnnnnnnnnnnnnnnnnnnnnnnnnnnnnnnnnnnnnnnnnnnnnnnnnnnnnnnnnnnnnnnnnnnnnnnnnnnnnnnnnnnnnnnnnnnnnnnnnnnnnnnnnnnnnnnnnnnnnnnnnnnnnnnnnnnnnnnnnnnnnnnnnnnnnnnnnnnnnnnnnnnnnnnnnnnnnnnnnnnnnnnnnnnnnnnnnnnnnnnnnnnnnnnnnnnnnnnnnnnnnnnnnnnnnnnnnnnnnnnnnnnnnnnnnnnnnnnnnnnnnnnnnnnnnnnnnnnnnnnnnnnnnnnnnnnnnnnnnnnnnnnnnnnnnnnnnnnnnnnnnnnnnnnnnnnnnnnnnnnnnnnnnnnnnnnnnnnnnnnnnnnnnnnnnnnnnnnnnnnnnnnnnnnnnnnnnnnnnnnnnnnnnnnnnnnnnnnnnnnnnnnnnnnnnnnnnnnnnnnnnnnnnnnnnnnnnnnnnnnnnnnnnnnnnnnnnnnnnnnnnnnnnnnnnnnnnnnnnnnnnnnnnnnnnnnnnnnnnnnnnnnnnnnnnnnnnnnnnnnnnnnnnnnnnnnnnnnnnnnnnnnnnnnnnnnnnnnnnnnnnnnnnnnnnnnnnnnnnnnnnnnnnnnnnnnnnnnnnnnnnnnnnnnnnnnnnnnnnnnnnnnnnnnnnnnnnnnnnnnnnnnnnnnnnnnnnnnnnnnnnnnnnnnnnnnnnnnnnnnnnnnnnnnnnnnnnnnnnnnnnnnnnnnnnnnnnnnnnnnnnnnnnnnnnnnnnnnnnnnnnnnnnnnnnnnnnnnnnnnnnnnnnnnnnnnnnnnnnnnnnnnnnnnnnnnnnnnnnnnnnnnnnnnnnnnnnnnnnnnnnnnnnnnnnnnnnnnnnnnnnnnnnnnnnnnnnnnnnnnnnnnnnnnnnnnnnnnnnnnnnnnnnnnnnnnnnnnnnnnnnnnnnnnnnnnnnnnnnnnnnnnnnnnnnnnnnnnnnnnnnnnnnnnnnnnnnnnnnnnnnnnnnnnnnnnnnnnnnnnnnnnnnnnnnnnnnnnnnnnnnnnnnnnnnnnnnnnnnnnnnnnnnnnnnnnnnnnnnnnnnnnnnnnnnnnnnnnnnnnnnnnnnnnnnnnnnnnnnnnnnnnnnnnnnnnnnnnnnnnnnnnnnnnnnnnnnnnnnnnnnnnnnnnnnnnnnnnnnnnnnnnnnnnnnnnnnnnnnnnnnnnnnnnnnnnnnnnnnnnnnnnnnnnnnnnnnnnnnnnnnnnnnnnnnnnnnnnnnnnnnnnnnnnnnnnnnnnnnnnnnnnnnnnnnnnnnnnnnnnnnnnnnnnnnnnnnnnnnnnnnnnnnnnnnnnnnnnnnnnnnnnnnnnnnnnnnnnnnnnnnnnnnnnnnnnnnnnnnnnnnnnnnnnnnnnnnnnnnnnnnnnnnnnnnnnnnnnnnnnnnnnnnnnnnnnnnnnnnnnnnnnnnnnnnnnnnnnnnnnnnnnnnnnnnnnnnnnnnnnnnnnnnnnnnnnnnnnnnnnnnnnnnnnnnnnnnnnnnnnnnnnnnnnnnnnnnnnnnnnnnnnnnnnnnnnnnnnnnnnnnnnnnnnnnnnnnnnnnnnnnnnnnnnnnnnnnnnnnnnnnnnnnnnnnnnnnnnnnnnnnnnnnnnnnnnnnnnnnnnnnnnnnnnnnnnnnnnnnnnnnnnnnnnnnnnnnnnnnnnnnnnnnnnnnnnnnnnnnnnnnnnnnnnnnnnnnnnnnnnnnnnnnnnnnnnnnnnnnnnnnnnnnnnnnnnnnnnnnnnnnnnnnnnnnnnnnnnnnnnnnnnnnnnnnnnnnnnnnnnnnnnnnnnnnnnnnnnnnnnnnnnnnnnnnnnnnnnnnnnnnnnnnnnnnnnnnnnnnnnnnnnnnnnnnnnnnnnnnnnnnnnnnnnnnnnnnnnnnnnnnnnnnnnnnnnnnnnnnnnnnnnnnnnnnnnnnnnnnnnnnnnnnnnnnnnnnnnnnnnnnnnnnnnnnnnnnnnnnnnnnnnnnnnnnnnnnnnnnnnnnnnnnnnnnnnnnnnnnnnnnnnnnnnnnnnnnnnnnnnnnnnnnnnnnnnnnnnnnnnnnnnnnnnnnnnnnnnnnnnnnnnnnnnnnnnnnnnnnnnnnnnnnnnnnnnnnnnnnnnnnnnnnnnnnnnnnnnnnnnnnnnnnnnnnnnnnnnnnnnnnnnnnnnnnnnnnnnnnnnnnnnnnnnnnnnnnnnnnnnnnnnnnnnnnnnnnnnnnnnnnnnnnnnnnnnnnnnnnnnnnnnnnnnnnnnnnnnnnnnnnnnnnnnnnnnnnnnnnnnnnnnnnnnnnnnnnnnnnnnnnnnnnnnnnnnnnnnnnnnnnnnnnnnnnnnnnnnnnnnnnnnnnnnnnnnnnnnnnnnnnnnnnnnnnnnnnnnnnnnnnnnnnnnnnnnnnnnnnnnnnnnnnnnnnnnnnnnnnnnnnnnnnnnnnnnnnnnnnnnnnnnnnnnnnnnnnnnnnnnnnnnnnnnnnnnnnnnnnnnnnnnnnnnnnnnnnnnnnnnnnnnnnnnnnnnnnnnnnnnnnnnnnnnnnnnnnnnnnnnnnnnnnnnnnnnnnnnnnnnnnnnnnnnnnnnnnnnnnnnnnnnnnnnnnnnnnnnnnnnnnnnnnnnnnnnnnnnnnnnnnnnnnnnnnnnnnnnnnnnnnnnnnnnnnnnnnnnnnnnnnnnnnnnnnnnnnnnnnnnnnnnnnnnnnnnnnnnnnnnnnnnnnnnnnnnnnnnnnnnnnnnnnnnnnnnnnnnnnnnnnnnnnnnnnnnnnnnnnnnnnnnnnnnnnnnnnnnnnnnnnnnnnnnnnnnnnnnnnnnnnnnnnnnnnnnnnnnnnnnnnnnnnnnnnnnnnnnnnnnnnnnnnnnnnnnnnnnnnnnnnnnnnnnnnnnnnnnnnnnnnnnnnnnnnnnnnnnnnnnnnnnnnnnnnnnnnnnnnnnnnnnnnnnnnnnnnnnnnnnnnnnnnnnnnnnnnnnnnnnnnnnnnnnnnnnnnnnnnnnnnnnnnnnnnnnnnnnnnnnnnnnnnnnnnnnnnnnnnnnnnnnnnnnnnnnnnnnnnnnnnnnnnnnnnnnnnnnnnnnnnnnnnnnnnnnnnnnnnnnnnnnnnnnnnnnnnnnnnnnnnnnnnnnnnnnnnnnnnnnnnnnnnnnnnnnnnnnnnnnnnnnnnnnnnnnnnnnnnnnnnnnnnnnnnnnnnnnnnnnnnnnnnnnnnnnnnnnnnnnnnnnnnnnnnnnnnnnnnnnnnnnnnnnnnnnnnnnnnnnnnnnnnnnnnnnnnnnnnnnnnnnnnnnnnnnnnnnnnnnnnnnnnnnnnnnnnnnnnnnnnnnnnnnnnnnnnnnnnnnnnnnnnnnnnnnnnnnnnnnnnnnnnnnnnnnnnnnnnnnnnnnnnnnnnnnnnnnnnnnnnnnnnnnnnnnnnnnnnnnnnnnnnnnnnnnnnnnnnnnnnnnnnnnnnnnnnnnnnnnnnnnnnnnnnnnnnnnnnnnnnnnnnnnnnnnnnnnnnnnnnnnnnnnnnnnnnnnnnnnnnnnnnnnnnnnnnnnnnnnnnnnnnnnnnnnnnnnnnnnnnnnnnnnnnnnnnnnnnnnnnnnnnnnnnnnnnnnnnnnnnnnnnnnnnnnnnnnnnnnnnnnnnnnnnnnnnnnnnnnnnnnnnnnnnnnnnnnnnnnnnnnnnnnnnnnnnnnnnnnnnnnnnnnnnnnnnnnnnnnnnnnnnnnnnnnnnnnnnnnnnnnnnnnnnnnnnnnnnnnnnnnnnnnnnnnnnnnnnnnnnnnnnnnnnnnnnnnnnnnnnnnnnnnnnnnnnnnnnnnnnnnnnnnnnnnnnnnnnnnnnnnnnnnnnnnnnnnnnnnnnnnnnnnnnnnnnnnnnnnnnnnnnnnnnnnnnnnnnnnnnnnnnnnnnnnnnnnnnnnnnnnnnnnnnnnnnnnnnnnnnnnnnnnnnnnnnnnnnnnnnnnnnnnnnnnnnnnnnnnnnnnnnnnnnnnnnnnnnnnnnnnnnnnnnnnnnnnnnnnnnnnnnnnnnnnnnnnnnnnnnnnnnnnnnnnnnnnnnnnnnnnnnnnnnnnnnnnnnnnnnnnnnnnnnnnnnnnnnnnnnnnnnnnnnnnnnnnnnnnnnnnnnnnnnnnnnnnnnnnnnnnnnnnnnnnnnnnnnnnnnnnnnnnnnnnnnnnnnnnnnnnnnnnnnnnnnnnnnnnnnnnnnnnnnnnnnnnnnnnnnnnnnnnnnnnnnnnnnnnnnnnnnnnnnnnnnnnnnnnnnnnnnnnnnnnnnnnnnnnnnnnnnnnnnnnnnnnnnnnnnnnnnnnnnnnnnnnnnnnnnnnnnnnnnnnnnnnnnnnnnnnnnnnnnnnnnnnnnnnnnnnnnnnnnnnnnnnnnnnnnnnnnnnnnnnnnnnnnnnnnnnnnnnnnnnnnnnnnnnnnnnnnnnnnnnnnnnnnnnnnnnnnnnnnnnnnnnnnnnnnnnnnnnnnnnnnnnnnnnnnnnnnnnnnnnnnnnnnnnnnnnnnnnnnnnnnnnnnnnnnnnnnnnnnnnnnnnnnnnnnnnnnnnnnnnnnnnnnnnnnnnnnnnnnnnnnnnnnnnnnnnnnnnnnnnnnnnnnnnnnnnnnnnnnnnnnnnnnnnnnnnnnnnnnnnnnnnnnnnnnnnnnnnnnnnnnnnnnnnnnnnnnnnnnnnnnnnnnnnnnnnnnnnnnnnnnnnnnnnnnnnnnnnnnnnnnnnnnnnnnnnnnnnnnnnnnnnnnnnnnnnnnnnnnnnnnnnnnnnnnnnnnnnnnnnnnnnnnnnnnnnnnnnnnnnnnnnnnnnnnnnnnnnnnnnnnnnnnnnnnnnnnnnnnnnnnnnnnnnnnnnnnnnnnnnnnnnnnnnnnnnnnnnnnnnnnnnnnnnnnnnnnnnnnnnnnnnnnnnnnnnnnnnnnnnnnnnnnnnnnnnnnnnnnnnnnnnnnnnnnnnnnnnnnnnnnnnnnnnnnnnnnnnnnnnnnnnnnnnnnnnnnnnnnnnnnnnnnnnnnnnnnnnnnnnnnnnnnnnnnnnnnnnnnnnnnnnnnnnnnnnnnnnnnnnnnnnnnnnnnnnnnnnnnnnnnnnnnnnnnnnnnnnnnnnnnnnnnnnnnnnnnnnnnnnnnnnnnnnnnnnnnnnnnnnnnnnnnnnnnnnnnnnnnnnnnnnnnnnnnnnnnnnnnnnnnnnnnnnnnnnnnnnnnnnnnnnnnnnnnnnnnnnnnnnnnnnnnnnnnnnnnnnnnnnnnnnnnnnnnnnnnnnnnnnnnnnnnnnnnnnnnnnnnnnnnnnnnnnnnnnnnnnnnnnnnnnnnnnnnnnnnnnnnnnnnnnnnnnnnnnnnnnnnnnnnnnnnnnnnnnnnnnnnnnnnnnnnnnnnnnnnnnnnnnnnnnnnnnnnnnnnnnnnnnnnnnnnnnnnnnnnnnnnnnnnnnnnnnnnnnnnnnnnnnnnnnnnnnnnnnnnnnnnnnnnnnnnnnnnnnnnnnnnnnnnnnnnnnnnnnnnnnnnnnnnnnnnnnnnnnnnnnnnnnnnnnnnnnnnnnnnnnnnnnnnnnnnnnnnnnnnnnnnnnnnnnnnnnnnnnnnnnnnnnnnnnnnnnnnnnnnnnnnnnnnnnnnnnnnnnnnnnnnnnnnnnnnnnnnnnnnnnnnnnnnnnnnnnnnnnnnnnnnnnnnnnnnnnnnnnnnnnnnnnnnnnnnnnnnnnnnnnnnnnnnnnnnnnnnnnnnnnnnnnnnnnnnnnnnnnnnnnnnnnnnnnnnnnnnnnnnnnnnnnnnnnnnnnnnnnnnnnnnnnnnnnnnnnnnnnnnnnnnnnnnnnnnnnnnnnnnnnnnnnnnnnnnnnnnnnnnnnnnnnnnnnnnnnnnnnnnnnnnnnnnnnnnnnnnnnnnnnnnnnnnnnnnnnnnnnnnnnnnnnnnnnnnnnnnnnnnnnnnnnnnnnnnnnnnnnnnnnnnnnnnnnnnnnnnnnnnnnnnnnnnnnnnnnnnnnnnnnnnnnnnnnnnnnnnnnnnnnnnnnnnnnnnnnnnnnnnnnnnnnnnnnnnnnnnnnnnnnnnnnnnnnnnnnnnnnnnnnnnnnnnnnnnnnnnnnnnnnnnnnnnnnnnnnnnnnnnnnnnnnnnnnnnnnnnnnnnnnnnnnnnnnnnnnnnnnnnnnnnnnnnnnnnnnnnnnnnnnnnnnnnnnnnnnnnnnnnnnnnnnnnnnnnnnnnnnnnnnnnnnnnnnnnnnnnnnnnnnnnnnnnnnnnnnnnnnnnnnnnnnnnnnnnnnnnnnnnnnnnnnnnnnnnnnnnnnnnnnnnnnnnnnnnnnnnnnnnnnnnnnnnnnnnnnnnnnnnnnnnnnnnnnnnnnnnnnnnnnnnnnnnnnnnnnnnnnnnnnnnnnnnnnnnnnnnnnnnnnnnnnnnnnnnnnnnnnnnnnnnnnnnnnnnnnnnnnnnnnnnnnnnnnnnnnnnnnnnnnnnnnnnnnnnnnnnnnnnnnnnnnnnnnnnnnnnnnnnnnnnnnnnnnnnnnnnnnnnnnnnnnnnnnnnnnnnnnnnnnnnnnnnnnnnnnnnnnnnnnnnnnnnnnnnnnnnnnnnnnnnnnnnnnnnnnnnnnnnnnnnnnnnnnnnnnnnnnnnnnnnnnnnnnnnnnnnnnnnnnnnnnnnnnnnnnnnnnnnnnnnnnnnnnnnnnnnnnnnnnnnnnnnnnnnnnnnnnnnnnnnnnnnnnnnnnnnnnnnnnnnnnnnnnnnnnnnnnnnnnnnnnnnnnnnnnnnnnnnnnnnnnnnnnnnnnnnnnnnnnnnnnnnnnnnnnnnnnnnnnnnnnnnnnnnnnnnnnnnnnnnnnnnnnnnnnnnnnnnnnnnnnnnnnnnnnnnnnnnnnnnnnnnnnnnnnnnnnnnnnnnnnnnnnnnnnnnnnnnnnnnnnnnnnnnnnnnnnnnnnnnnnnnnnnnnnnnnnnnnnnnnnnnnnnnnnnnnnnnnnnnnnnnnnnnnnnnnnnnnnnnnnnnnnnnnnnnnnnnnnnnnnnnnnnnnnnnnnnnnnnnnnnnnnnnnnnnnnnnnnnnnnnnnnnnnnnnnnnnnnnnnnnnnnnnnnnnnnnnnnnnnnnnnnnnnnnnnnnnnnnnnnnnnnnnnnnnnnnnnnnnnnnnnnnnnnnnnnnnnnnnnnnnnnnnnnnnnnnnnnnnnnnnnnnnnnnnnnnnnnnnnnnnnnnnnnnnnnnnnnnnnnnnnnnnnnnnnnnnnnnnnnnnnnnnnnnnnnnnnnnnnnnnnnnnnnnnnnnnnnnnnnnnnnnnnnnnnnnnnnnnnnnnnnnnnnnnnnnnnnnnnnnnnnnnnnnnnnnnnnnnnnnnnnnnnnnnnnnnnnnnnnnnnnnnnnnnnnnnnnnnnnnnnnnnnnnnnnnnnnnnnnnnnnnnnnnnnnnnnnnnnnnnnnnnnnnnnnnnnnnnnnnnnnnnnnnnnnnnnnnnnnnnnnnnnnnnnnnnnnnnnnnnnnnnnnnnnnnnnnnnnnnnnnnnnnnnnnnnnnnnnnnnnnnnnnnnnnnnnnnnnnnnnnnnnnnnnnnnnnnnnnnnnnnnnnnnnnnnnnnnnnnnnnnnnnnnnnnnnnnnnnnnnnnnnnnnnnnnnnnnnnnnnnnnnnnnnnnnnnnnnnnnnnnnnnnnnnnnnnnnnnnnnnnnnnnnnnnnnnnnnnnnnnnnnnnnnnnnnnnnnnnnnnnnnnnnnnnnnnnnnnnnnnnnnnnnnnnnnnnnnnnnnnnnnnnnnnnnnnnnnnnnnnnnnnnnnnnnnnnnnnnnnnnnnnnnnnnnnnnnnnnnnnnnnnnnnnnnnnnnnnnnnnnnnnnnnnnnnnnnnnnnnnnnnnnnnnnnnnnnnnnnnnnnnnnnnnnnnnnnnnnnnnnnnnnnnnnnnnnnnnnnnnnnnnnnnnnnnnnnnnnnnnnnnnnnnnnnnnnnnnnnnnnnnnnnnnnnnnnnnnnnnnnnnnnnnnnnnnnnnnnnnnnnnnnnnnnnnnnnnnnnnnnnnnnnnnnnnnnnnnnnnnnnnnnnnnnnnnnnnnnnnnnnnnnnnnnnnnnnnnnnnnnnnnnnnnnnnnnnnnnnnnnnnnnnnnnnnnnnnnnnnnnnnnnnnnnnnnnnnnnnnnnnnnnnnnnnnnnnnnnnnnnnnnnnnnnnnnnnnnnnnnnnnnnnnnnnnnnnnnnnnnnnnnnnnnnnnnnnnnnnnnnnnnnnnnnnnnnnnnnnnnnnnnnnnnnnnnnnnnnnnnnnnnnnnnnnnnnnnnnnnnnnnnnnnnnnnnnnnnnnnnnnnnnnnnnnnnnnnnnnnnnnnnnnnnnnnnnnnnnnnnnnnnnnnnnnnnnnnnnnnnnnnnnnnnnnnnnnnnnnnnnnnnnnnnnnnnnnnnnnnnnnnnnnnnnnnnnnnnnnnnnnnnnnnnnnnnnnnnnnnnnnnnnnnnnnnnnnnnnnnnnnnnnnnnnnnnnnnnnnnnnnnnnnnnnnnnnnnnnnnnnnnnnnnnnnnnnnnnnnnnnnnnnnnnnnnnnnnnnnnnnnnnnnnnnnnnnnnnnnnnnnnnnnnnnnnnnnnnnnnnnnnnnnnnnnnnnnnnnnnnnnnnnnnnnnnnnnnnnnnnnnnnnnnnnnnnnnnnnnnnnnnnnnnnnnnnnnnnnnnnnnnnnnnnnnnnnnnnnnnnnnnnnnnnnnnnnnnnnnnnnnnnnnnnnnnnnnnnnnnnnnnnnnnnnnnnnnnnnnnnnnnnnnnnnnnnnnnnnnnnnnnnnnnnnnnnnnnnnnnnnnnnnnnnnnnnnnnnnnnnnnnnnnnnnnnnnnnnnnnnnnnnnnnnnnnnnnnnnnnnnnnnnnnnnnnnnnnnnnnnnnnnnnnnnnnnnnnnnnnnnnnnnnnnnnnnnnnnnnnnnnnnnnnnnnnnnnnnnnnnnnnnnnnnnnnnnnnnnnnnnnnnnnnnnnnnnnnnnnnnnnnnnnnnnnnnnnnnnnnnnnnnnnnnnnnnnnnnnnnnnnnnnnnnnnnnnnnnnnnnnnnnnnnnnnnnnnnnnnnnnnnnnnnnnnnnnnnnnnnnnnnnnnnnnnnnnnnnnnnnnnnnnnnnnnnnnnnnnnnnnnnnnnnnnnnnnnnnnnnnnnnnnnnnnnnnnnnnnnnnnnnnnnnnnnnnnnnnnnnnnnnnnnnnnnnnnnnnnnnnnnnnnnnnnnnnnnnnnnnnnnnnnnnnnnnnnnnnnnnnnnnnnnnnnnnnnnnnnnnnnnnnnnnnnnnnnnnnnnnnnnnnnnnnnnnnnnnnnnnnnnnnnnnnnnnnnnnnnnnnnnnnnnnnnnnnnnnnnnnnnnnnnnnnnnnnnnnnnnnnnnnnnnnnnnnnnnnnnnnnnnnnnnnnnnnnnnnnnnnnnnnnnnnnnnnnnnnnnnnnnnnnnnnnnnnnnnnnnnnnnnnnnnnnnnnnnnnnnnnnnnnnnnnnnnnnnnnnnnnnnnnnnnnnnnnnnnnnnnnnnnnnnnnnnnnnnnnnnnnnnnnnnnnnnnnnnnnnnnnnnnnnnnnnnnnnnnnnnnnnnnnnnnnnnnnnnnnnnnnnnnnnnnnnnnnnnnnnnnnnnnnnnnnnnnnnnnnnnnnnnnnnnnnnnnnnnnnnnnnnnnnnnnnnnnnnnnnnnnnnnnnnnnnnnnnnnnnnnnnnnnnnnnnnnnnnnnnnnnnnnnnnnnnnnnnnnnnnnnnnnnnnnnnnnnnnnnnnnnnnnnnnnnnnnnnnnnnnnnnnnnnnnnnnnnnnnnnnnnnnnnnnnnnnnnnnnnnnnnnnnnnnnnnnnnnnnnnnnnnnnnnnnnnnnnnnnnnnnnnnnnnnnnnnnnnnnnnnnnnnnnnnnnnnnnnnnnnnnnnnnnnnnnnnnnnnnnnnnnnnnnnnnnnnnnnnnnnnnnnnnnnnnnnnnnnnnnnnnnnnnnnnnnnnnnnnnnnnnnnnnnnnnnnnnnnnnnnnnnnnnnnnnnnnnnnnnnnnnnnnnnnnnnnnnnnnnnnnnnnnnnnnnnnnnnnnnnnnnnnnnnnnnnnnnnnnnnnnnnnnnnnnnnnnnnnnnnnnnnnnnnnnnnnnnnnnnnnnnnnnnnnnnnnnnnnnnnnnnnnnnnnnnnnnnnnnnnnnnnnnnnnnnnnnnnnnnnnnnnnnnnnnnnnnnnnnnnnnnnnnnnnnnnnnnnnnnnnnnnnnnnnnnnnnnnnnnnnnnnnnnnnnnnnnnnnnnnnnnnnnnnnnnnnnnnnnnnnnnnnnnnnnnnnnnnnnnnnnnnnnnnnnnnnnnnnnnnnnnnnnnnnnnnnnnnnnnnnnnnnnnnnnnnnnnnnnnnnnnnnnnnnnnnnnnnnnnnnnnnnnnnnnnnnnnnnnnnnnnnnnnnnnnnnnnnnnnnnnnnnnnnnnnnnnnnnnnnnnnnnnnnnnnnnnnnnnnnnnnnnnnnnnnnnnnnnnnnnnnnnnnnnnnnnnnnnnnnnnnnnnnnnnnnnnnnnnnnnnnnnnnnnnnnnnnnnnnnnnnnnnnnnnnnnnnnnnnnnnnnnnnnnnnnnnnnnnnnnnnnnnnnnnnnnnnnnnnnnnnnnnnnnnnnnnnnnnnnnnnnnnnnnnnnnnnnnnnnnnnnnnnnnnnnnnnnnnnnnnnnnnnnnnnnnnnnnnnnnnnnnnnnnnnnnnnnnnnnnnnnnnnnnnnnnnnnnnnnnnnnnnnnnnnnnnnnnnnnnnnnnnnnnnnnnnnnnnnnnnnnnnnnnnnnnnnnnnnnnnnnnnnnnnnnnnnnnnnnnnnnnnnnnnnnnnnnnnnnnnnnnnnnnnnnnnnnnnnnnnnnnnnnnnnnnnnnnnnnnnnnnnnnnnnnnnnnnnnnnnnnnnnnnnnnnnnnnnnnnnnnnnnnnnnnnnnnnnnnnnnnnnnnnnnnnnnnnnnnnnnnnnnnnnnnnnnnnnnnnnnnnnnnnnnnnnnnnnnnnnnnnnnnnnnnnnnnnnnnnnnnnnnnnnnnnnnnnnnnnnnnnnnnnnnnnnnnnnnnnnnnnnnnnnnnnnnnnnnnnnnnnnnnnnnnnnnnnnnnnnnnnnnnnnnnnnnnnnnnnnnnnnnnnnnnnnnnnnnnnnnnnnnnnnnnnnnnnnnnnnnnnnnnnnnnnnnnnnnnnnnnnnnnnnnnnnnnnnnnnnnnnnnnnnnnnnnnnnnnnnnnnnnnnnnnnnnnnnnnnnnnnnnnnnnnnnnnnnnnnnnnnnnnnnnnnnnnnnnnnnnnnnnnnnnnnnnnnnnnnnnnnnnnnnnnnnnnnnnnnnnnnnnnnnnnnnnnnnnnnnnnnnnnnnnnnnnnnnnnnnnnnnnnnnnnnnnnnnnnnnnnnnnnnnnnnnnnnnnnnnnnnnnnnnnnnnnnnnnnnnnnnnnnnnnnnnnnnnnnnnnnnnnnnnnnnnnnnnnnnnnnnnnnnnnnnnnnnnnnnnnnnnnnnnnnnnnnnnnnnnnnnnnnnnnnnnnnnnnnnnnnnnnnnnnnnnnnnnnnnnnnnnnnnnnnnnnnnnnnnnnnnnnnnnnnnnnnnnnnnnnnnnnnnnnnnnnnnnnnnnnnnnnnnnnnnnnnnnnnnnnnnnnnnnnnnnnnnnnnnnnnnnnnnnnnnnnnnnnnnnnnnnnnnnnnnnnnnnnnnnnnnnnnnnnnnnnnnnnnnnnnnnnnnnnnnnnnnnnnnnnnnnnnnnnnnnnnnnnnnnnnnnnnnnnnnnnnnnnnnnnnnnnnnnnnnnnnnnnnnnnnnnnnnnnnnnnnnnnnnnnnnnnnnnnnnnnnnnnnnnnnnnnnnnnnnnnnnnnnnnnnnnnnnnnnnnnnnnnnnnnnnnnnnnnnnnnnnnnnnnnnnnnnnnnnnnnnnnnnnnnnnnnnnnnnnnnnnnnnnnnnnnnnnnnnnnnnnnnnnnnnnnnnnnnnnnnnnnnnnnnnnnnnnnnnnnnnnnnnnnnnnnnnnnnnnnnnnnnnnnnnnnnnnnnnnnnnnnnnnnnnnnnnnnnnnnnnnnnnnnnnnnnnnnnnnnnnnnnnnnnnnnnnnnnnnnnnnnnnnnnnnnnnnnnnnnnnnnnnnnnnnnnnnnnnnnnnnnnnnnnnnnnnnnnnnnnnnnnnnnnnnnnnnnnnnnnnnnnnnnnnnnnnnnnnnnnnnnnnnnnnnnnnnnnnnnnnnnnnnnnnnnnnnnnnnnnnnnnnnnnnnnnnnnnnnnnnnnnnnnnnnnnnnnnnnnnnnnnnnnnnnnnnnnnnnnnnnnnnnnnnnnnnnnnnnnnnnnnnnnnnnnnnnnnnnnnnnnnnnnnnnnnnnnnnnnnnnnnnnnnnnnnnnnnnnnnnnnnnnnnnnnnnnnnnnnnnnnnnnnnnnnnnnnnnnnnnnnnnnnnnnnnnnnnnnnnnnnnnnnnnnnnnnnnnnnnnnnnnnnnnnnnnnnnnnnnnnnnnnnnnnnnnnnnnnnnnnnnnnnnnnnnnnnnnnnnnnnnnnnnnnnnnnnnnnnnnnnnnnnnnnnnnnnnnnnnnnnnnnnnnnnnnnnnnnnnnnnnnnnnnnnnnnnnnnnnnnnnnnnnnnnnnnnnnnnnnnnnnnnnnnnnnnnnnnnnnnnnnnnnnnnnnnnnnnnnnnnnnnnnnnnnnnnnnnnnnnnnnnnnnnnnnnnnnnnnnnnnnnnnnnnnnnnnnnnnnnnnnnnnnnnnnnnnnnnnnnnnnnnnnnnnnnnnnnnnnnnnnnnnnnnnnnnnnnnnnnnnnnnnnnnnnnnnnnnnnnnnnnnnnnnnnnnnnnnnnnnnnnnnnnnnnnnnnnnnnnnnnnnnnnnnnnnnnnnnnnnnnnnnnnnnnnnnnnnnnnnnnnnnnnnnnnnnnnnnnnnnnnnnnnnnnnnnnnnnnnnnnnnnnnnnnnnnnnnnnnnnnnnnnnnnnnnnnnnnnnnnnnnnnnnnnnnnnnnnnnnnnnnnnnnnnnnnnnnnnnnnnnnnnnnnnnnnnnnnnnnnnnnnnnnnnnnnnnnnnnnnnnnnnnnnnnnnnnnnnnnnnnnnnnnnnnnnnnnnnnnnnnnnnnnnnnnnnnnnnnnnnnnnnnnnnnnnnnnnnnnnnnnnnnnnnnnnnnnnnnnnnnnnnnnnnnnnnnnnnnnnnnnnnnnnnnnnnnnnnnnnnnnnnnnnnnnnnnnnnnnnnnnnnnnnnnnnnnnnnnnnnnnnnnnnnnnnnnnnnnnnnnnnnnnnnnnnnnnnnnnnnnnnnnnnnnnnnnnnnnnnnnnnnnnnnnnnnnnnnnnnnnnnnnnnnnnnnnnnnnnnnnnnnnnnnnnnnnnnnnnnnnnnnnnnnnnnnnnnnnnnnnnnnnnnnnnnnnnnnnnnnnnnnnnnnnnnnnnnnnnnnnnnnnnnnnnnnnnnnnnnnnnnnnnnnnnnnnnnnnnnnnnnnnnnnnnnnnnnnnnnnnnnnnnnnnnnnnnnnnnnnnnnnnnnnnnnnnnnnnnnnnnnnnnnnnnnnnnnnnnnnnnnnnnnnnnnnnnnnnnnnnnnnnnnnnnnnnnnnnnnnnnnnnnnnnnnnnnnnnnnnnnnnnnnnnnnnnnnnnnnnnnnnnnnnnnnnnnnnnnnnnnnnnnnnnnnnnnnnnnnnnnnnnnnnnnnnnnnnnnnnnnnnnnnnnnnnnnnnnnnnnnnnnnnnnnnnnnnnnnnnnnnnnnnnnnnnnnnnnnnnnnnnnnnnnnnnnnnnnnnnnnnnnnnnnnnnnnnnnnnnnnnnnnnnnnnnnnnnnnnnnnnnnnnnnnnnnnnnnnnnnnnnnnnnnnnnnnnnnnnnnnnnnnnnnnnnnnnnnnnnnnnnnnnnnnnnnnnnnnnnnnnnnnnnnnnnnnnnnnnnnnnnnnnnnnnnnnnnnnnnnnnnnnnnnnnnnnnnnnnnnnnnnnnnnnnnnnnnnnnnnnnnnnnnnnnnnnnnnnnnnnnnnnnnnnnnnnnnnnnnnnnnnnnnnnnnnnnnnnnnnnnnnnnnnnnnnnnnnnnnnnnnnnnnnnnnnnnnnnnnnnnnnnnnnnnnnnnnnnnnnnnnnnnnnnnnnnnnnnnnnnnnnnnnnnnnnnnnnnnnnnnnnnnnnnnnnnnnnnnnnnnnnnnnnnnnnnnnnnnnnnnnnnnnnnnnnnnnnnnnnnnnnnnnnnnnnnnnnnnnnnnnnnnnnnnnnnnnnnnnnnnnnnnnnnnnnnnnnnnnnnnnnnnnnnnnnnnnnnnnnnnnnnnnnnnnnnnnnnnnnnnnnnnnnnnnnnnnnnnnnnnnnnnnnnnnnnnnnnnnnnnnnnnnnnnnnnnnnnnnnnnnnnnnnnnnnnnnnnnnnnnnnnnnnnnnnnnnnnnnnnnnnnnnnnnnnnnnnnnnnnnnnnnnnnnnnnnnnnnnnnnnnnnnnnnnnnnnnnnnnnnnnnnnnnnnnnnnnnnnnnnnnnnnnnnnnnnnnnnnnnnnnnnnnnnnnnnnnnnnnnnnnnnnnnnnnnnnnnnnnnnnnnnnnnnnnnnnnnnnnnnnnnnnnnnnnnnnnnnnnnnnnnnnnnnnnnnnnnnnnnnnnnnnnnnnnnnnnnnnnnnnnnnnnnnnnnnnnnnnnnnnnnnnnnnnnnnnnnnnnnnnnnnnnnnnnnnnnnnnnnnnnnnnnnnnnnnnnnnnnnnnnnnnnnnnnnnnnnnnnnnnnnnnnnnnnnnnnnnnnnnnnnnnnnnnnnnnnnnnnnnnnnnnnnnnnnnnnnnnnnnnnnnnnnnnnnnnnnnnnnnnnnnnnnnnnnnnnnnnnnnnnnnnnnnnnnnnnnnnnnnnnnnnnnnnnnnnnnnnnnnnnnnnnnnnnnnnnnnnnnnnnnnnnnnnnnnnnnnnnnnnnnnnnnnnnnnnnnnnnnnnnnnnnnnnnnnnnnnnnnnnnnnnnnnnnnnnnnnnnnnnnnnnnnnnnnnnnnnnnnnnnnnnnnnnnnnnnnnnnnnnnnnnnnnnnnnnnnnnnnnnnnnnnnnnnnnnnnnnnnnnnnnnnnnnnnnnnnnnnnnnnnnnnnnnnnnnnnnnnnnnnnnnnnnnnnnnnnnnnnnnnnnnnnnnnnnnnnnnnnnnnnnnnnnnnnnnnnnnnnnnnnnnnnnnnnnnnnnnnnnnnnnnnnnnnnnnnnnnnnnnnnnnnnnnnnnnnnnnnnnnnnnnnnnnnnnnnnnnnnnnnnnnnnnnnnnnnnnnnnnnnnnnnnnnnnnnnnnnnnnnnnnnnnnnnnnnnnnnnnnnnnnnnnnnnnnnnnnnnnnnnnnnnnnnnnnnnnnnnnnnnnnnnnnnnnnnnnnnnnnnnnnnnnnnnnnnnnnnnnnnnnnnnnnnnnnnnnnnnnnnnnnnnnnnnnnnnnnnnnnnnnnnnnnnnnnnnnnnnnnnnnnnnnnnnnnnnnnnnnnnnnnnnnnnnnnnnnnnnnnnnnnnnnnnnnnnnnnnnnnnnnnnnnnnnnnnnnnnnnnnnnnnnnnnnnnnnnnnnnnnnnnnnnnnnnnnnnnnnnnnnnnnnnnnnnnnnnnnnnnnnnnnnnnnnnnnnnnnnnnnnnnnnnnnnnnnnnnnnnnnnnnnnnnnnnnnnnnnnnnnnnnnnnnnnnnnnnnnnnnnnnnnnnnnnnnnnnnnnnnnnnnnnnnnnnnnnnnnnnnnnnnnnnnnnnnnnnnnnnnnnnnnnnnnnnnnnnnnnnnnnnnnnnnnnnnnnnnnnnnnnnnnnnnnnnnnnnnnnnnnnnnnnnnnnnnnnnnnnnnnnnnnnnnnnnnnnnnnnnnnnnnnnnnnnnnnnnnnnnnnnnnnnnnnnnnnnnnnnnnnnnnnnnnnnnnnnnnnnnnnnnnnnnnnnnnnnnnnnnnnnnnnnnnnnnnnnnnnnnnnnnnnnnnnnnnnnnnnnnnnnnnnnnnnnnnnnnnnnnnnnnnnnnnnnnnnnnnnnnnnnnnnnnnnnnnnnnnnnnnnnnnnnnnnnnnnnnnnnnnnnnnnnnnnnnnnnnnnnnnnnnnnnnnnnnnnnnnnnnnnnnnnnnnnnnnnnnnnnnnnnnnnnnnnnnnnnnnnnnnnnnnnnnnnnnnnnnnnnnnnnnnnnnnnnnnnnnnnnnnnnnnnnnnnnnnnnnnnnnnnnnnnnnnnnnnnnnnnnnnnnnnnnnnnnnnnnnnnnnnnnnnnnnnnnnnnnnnnnnnnnnnnnnnnnnnnnnnnnnnnnnnnnnnnnnnnnnnnnnnnnnnnnnnnnnnnnnnnnnnnnnnnnnnnnnnnnnnnnnnnnnnnnnnnnnnnnnnnnnnnnnnnnnnnnnnnnnnnnnnnnnnnnnnnnnnnnnnnnnnnnnnnnnnnnnnnnnnnnnnnnnnnnnnnnnnnnnnnnnnnnnnnnnnnnnnnnnnnnnnnnnnnnnnnnnnnnnnnnnnnnnnnnnnnnnnnnnnnnnnnnnnnnnnnnnnnnnnnnnnnnnnnnnnnnnnnnnnnnnnnnnnnnnnnnnnnnnnnnnnnnnnnnnnnnnnnnnnnnnnnnnnnnnnnnnnnnnnnnnnnnnnnnnnnnnnnnnnnnnnnnnnnnnnnnnnnnnnnnnnnnnnnnnnnnnnnnnnnnnnnnnnnnnnnnnnnnnnnnnnnnnnnnnnnnnnnnnnnnnnnnnnnnnnnnnnnnnnnnnnnnnnnnnnnnnnnnnnnnnnnnnnnnnnnnnnnnnnnnnnnnnnnnnnnnnnnnnnnnnnnnnnnnnnnnnnnnnnnnnnnnnnnnnnnnnnnnnnnnnnnnnnnnnnnnnnnnnnnnnnnnnnnnnnnnnnnnnnnnnnnnnnnnnnnnnnnnnnnnnnnnnnnnnnnnnnnnnnnnnnnnnnnnnnnnnnnnnnnnnnnnnnnnnnnnnnnnnnnnnnnnnnnnnnnnnnnnnnnnnnnnnnnnnnnnnnnnnnnnnnnnnnnnnnnnnnnnnnnnnnnnnnnnnnnnnnnnnnnnnnnnnnnnnnnnnnnnnnnnnnnnnnnnnnnnnnnnnnnnnnnnnnnnnnnnnnnnnnnnnnnnnnnnnnnnnnnnnnnnnnnnnnnnnnnnnnnnnnnnnnnnnnnnnnnnnnnnnnnnnnnnnnnnnnnnnnnnnnnnnnnnnnnnnnnnnnnnnnnnnnnnnnnnnnnnnnnnnnnnnnnnnnnnnnnnnnnnnnnnnnnnnnnnnnnnnnnnnnnnnnnnnnnnnnnnnnnnnnnnnnnnnnnnnnnnnnnnnnnnnnnnnnnnnnnnnnnnnnnnnnnnnnnnnnnnnnnnnnnnnnnnnnnnnnnnnnnnnnnnnnnnnnnnnnnnnnnnnnnnnnnnnnnnnnnnnnnnnnnnnnnnnnnnnnnnnnnnnnnnnnnnnnnnnnnnnnnnnnnnnnnnnnnnnnnnnnnnnnnnnnnnnnnnnnnnnnnnnnnnnnnnnnnnnnnnnnnnnnnnnnnnnnnnnnnnnnnnnnnnnnnnnnnnnnnnnnnnnnnnnnnnnnnnnnnnnnnnnnnnnnnnnnnnnnnnnnnnnnnnnnnnnnnnnnnnnnnnnnnnnnnnnnnnnnnnnnnnnnnnnnnnnnnnnnnnnnnnnnnnnnnnnnnnnnnnnnnnnnnnnnnnnnnnnnnnnnnnnnnnnnnnnnnnnnnnnnnnnnnnnnnnnnnnnnnnnnnnnnnnnnnnnnnnnnnnnnnnnnnnnnnnnnnnnnnnnnnnnnnnnnnnnnnnnnnnnnnnnnnnnnnnnnnnnnnnnnnnnnnnnnnnnnnnnnnnnnnnnnnnnnnnnnnnnnnnnnnnnnnnnnnnnnnnnnnnnnnnnnnnnnnnnnnnnnnnnnnnnnnnnnnnnnnnnnnnnnnnnnnnnnnnnnnnnnnnnnnnnnnnnnnnnnnnnnnnnnnnnnnnnnnnnnnnnnnnnnnnnnnnnnnnnnnnnnnnnnnnnnnnnnnnnnnnnnnnnnnnnnnnnnnnnnnnnnnnnnnnnnnnnnnnnnnnnnnnnnnnnnnnnnnnnnnnnnnnnnnnnnnnnnnnnnnnnnnnnnnnnnnnnnnnnnnnnnnnnnnnnnnnnnnnnnnnnnnnnnnnnnnnnnnnnnnnnnnnnnnnnnnnnnnnnnnnnnnnnnnnnnnnnnnnnnnnnnnnnnnnnnnnnnnnnnnnnnnnnnnnnnnnnnnnnnnnnnnnnnnnnnnnnnnnnnnnnnnnnnnnnnnnnnnnnnnnnnnnnnnnnnnnnnnnnnnnnnnnnnnnnnnnnnnnnnnnnnnnnnnnnnnnnnnnnnnnnnnnnnnnnnnnnnnnnnnnnnnnnnnnnnnnnnnnnnnnnnnnnnnnnnnnnnnnnnnnnnnnnnnnnnnnnnnnnnnnnnnnnnnnnnnnnnnnnnnnnnnnnnnnnnnnnnnnnnnnnnnnnnnnnnnnnnnnnnnnnnnnnnnnnnnnnnnnnnnnnnnnnnnnnnnnnnnnnnnnnnnnnnnnnnnnnnnnnnnnnnnnnnnnnnnnnnnnnnnnnnnnnnnnnnnnnnnnnnnnnnnnnnnnnnnnnnnnnnnnnnnnnnnnnnnnnnnnnnnnnnnnnnnnnnnnnnnnnnnnnnnnnnnnnnnnnnnnnnnnnnnnnnnnnnnnnnnnnnnnnnnnnnnnnnnnnnnnnnnnnnnnnnnnnnnnnnnnnnnnnnnnnnnnnnnnnnnnnnnnnnnnnnnnnnnnnnnnnnnnnnnnnnnnnnnnnnnnnnnnnnnnnnnnnnnnnnnnnnnnnnnnnnnnnnnnnnnnnnnnnnnnnnnnnnnnnnnnnnnnnnnnnnnnnnnnnnnnnnnnnnnnnnnnnnnnnnnnnnnnnnnnnnnnnnnnnnnnnnnnnnnnnnnnnnnnnnnnnnnnnnnnnnnnnnnnnnnnnnnnnnnnnnnnnnnnnnnnnnnnnnnnnnnnnnnnnnnnnnnnnnnnnnnnnnnnnnnnnnnnnnnnnnnnnnnnnnnnnnnnnnnnnnnnnnnnnnnnnnnnnnnnnnnnnnnnnnnnnnnnnnnnnnnnnnnnnnnnnnnnnnnnnnnnnnnnnnnnnnnnnnnnnnnnnnnnnnnnnnnnnnnnnnnnnnnnnnnnnnnnnnnnnnnnnnnnnnnnnnnnnnnnnnnnnnnnnnnnnnnnnnnnnnnnnnnnnnnnnnnnnnnnnnnnnnnnnnnnnnnnnnnnnnnnnnnnnnnnnnnnnnnnnnnnnnnnnnnnnnnnnnnnnnnnnnnnnnnnnnnnnnnnnnnnnnnnnnnnnnnnnnnnnnnnnnnnnnnnnnnnnnnnnnnnnnnnnnnnnnnnnnnnnnnnnnnnnnnnnnnnnnnnnnnnnnnnnnnnnnnnnnnnnnnnnnnnnnnnnnnnnnnnnnnnnnnnnnnnnnnnnnnnnnnnnnnnnnnnnnnnnnnnnnnnnnnnnnnnnnnnnnnnnnnnnnnnnnnnnnnnnnnnnnnnnnnnnnnnnnnnnnnnnnnnnnnnnnnnnnnnnnnnnnnnnnnnnnnnnnnnnnnnnnnnnnnnnnnnnnnnnnnnnnnnnnnnnnnnnnnnnnnnnnnnnnnnnnnnnnnnnnnnnnnnnnnnnnnnnnnnnnnnnnnnnnnnnnnnnnnnnnnnnnnnnnnnnnnnnnnnnnnnnnnnnnnnnnnnnnnnnnnnnnnnnnnnnnnnnnnnnnnnnnnnnnnnnnnnnnnnnnnnnnnnnnnnnnnnnnnnnnnnnnnnnnnnnnnnnnnnnnnnnnnnnnnnnnnnnnnnnnnnnnnnnnnnnnnnnnnnnnnnnnnnnnnnnnnnnnnnnnnnnnnnnnnnnnnnnnnnnnnnnnnnnnnnnnnnnnnnnnnnnnnnnnnnnnnnnnnnnnnnnnnnnnnnnnnnnnnnnnnnnnnnnnnnnnnnnnnnnnnnnnnnnnnnnnnnnnnnnnnnnnnnnnnnnnnnnnnnnnnnnnnnnnnnnnnnnnnnnnnnnnnnnnnnnnnnnnnnnnnnnnnnnnnnnnnnnnnnnnnnnnnnnnnnnnnnnnnnnnnnnnnnnnnnnnnnnnnnnnnnnnnnnnnnnnnnnnnnnnnnnnnnnnnnnnnnnnnnnnnnnnnnnnnnnnnnnnnnnnnnnnnnnnnnnnnnnnnnnnnnnnnnnnnnnnnnnnnnnnnnnnnnnnnnnnnnnnnnnnnnnnnnnnnnnnnnnnnnnnnnnnnnnnnnnnnnnnnnnnnnnnnnnnnnnnnnnnnnnnnnnnnnnnnnnnnnnnnnnnnnnnnnnnnnnnnnnnnnnnnnnnnnnnnnnnnnnnnnnnnnnnnnnnnnnnnnnnnnnnnnnnnnnnnnnnnnnnnnnnnnnnnnnnnnnnnnnnnnnnnnnnnnnnnnnnnnnnnnnnnnnnnnnnnnnnnnnnnnnnnnnnnnnnnnnnnnnnnnnnnnnnnnnnnnnnnnnnnnnnnnnnnnnnnnnnnnnnnnnnnnnnnnnnnnnnnnnnnnnnnnnnnnnnnnnnnnnnnnnnnnnnnnnnnnnnnnnnnnnnnnnnnnnnnnnnnnnnnnnnnnnnnnnnnnnnnnnnnnnnnnnnnnnnnnnnnnnnnnnnnnnnnnnnnnnnnnnnnnnnnnnnnnnnnnnnnnnnnnnnnnnnnnnnnnnnnnnnnnnnnnnnnnnnnnnnnnnnnnnnnnnnnnnnnnnnnnnnnnnnnnnnnnnnnnnnnnnnnnnnnnnnnnnnnnnnnnnnnnnnnnnnnnnnnnnnnnnnnnnnnnnnnnnnnnnnnnnnnnnnnnnnnnnnnnnnnnnnnnnnnnnnnnnnnnnnnnnnnnnnnnnnnnnnnnnnnnnnnnnnnnnnnnnnnnnnnnnnnnnnnnnnnnnnnnnnnnnnnnnnnnnnnnnnnnnnnnnnnnnnnnnnnnnnnnnnnnnnnnnnnnnnnnnnnnnnnnnnnnnnnnnnnnnnnnnnnnnnnnnnnnnnnnnnnnnnnnnnnnnnnnnnnnnnnnnnnnnnnnnnnnnnnnnnnnnnnnnnnnnnnnnnnnnnnnnnnnnnnnnnnnnnnnnnnnnnnnnnnnnnnnnnnnnnnnnnnnnnnnnnnnnnnnnnnnnnnnnnnnnnnnnnnnnnnnnnnnnnnnnnnnnnnnnnnnnnnnnnnnnnnnnnnnnnnnnnnnnnnnnnnnnnnnnnnnnnnnnnnnnnnnnnnnnnnnnnnnnnnnnnnnnnnnnnnnnnnnnnnnnnnnnnnnnnnnnnnnnnnnnnnnnnnnnnnnnnnnnnnnnnnnnnnnnnnnnnnnnnnnnnnnnnnnnnnnnnnnnnnnnnnnnnnnnnnnnnnnnnnnnnnnnnnnnnnnnnnnnnnnnnnnnnnnnnnnnnnnnnnnnnnnnnnnnnnnnnnnnnnnnnnnnnnnnnnnnnnnnnnnnnnnnnnnnnnnnnnnnnnnnnnnnnnnnnnnnnnnnnnnnnnnnnnnnnnnnnnnnnnnnnnnnnnnnnnnnnnnnnnnnnnnnnnnnnnnnnnnnnnnnnnnnnnnnnnnnnnnnnnnnnnnnnnnnnnnnnnnnnnnnnnnnnnnnnnnnnnnnnnnnnnnnnnnnnnnnnnnnnnnnnnnnnnnnnnnnnnnnnnnnnnnnnnnnnnnnnnnnnnnnnnnnnnnnnnnnnnnnnnnnnnnnnnnnnnnnnnnnnnnnnnnnnnnnnnnnnnnnnnnnnnnnnnnnnnnnnnnnnnnnnnnnnnnnnnnnnnnnnnnnnnnnnnnnnnnnnnnnnnnnnnnnnnnnnnnnnnnnnnnnnnnnnnnnnnnnnnnnnnnnnnnnnnnnnnnnnnnnnnnnnnnnnnnnnnnnnnnnnnnnnnnnnnnnnnnnnnnnnnnnnnnnnnnnnnnnnnnnnnnnnnnnnnnnnnnnnnnnnnnnnnnnnnnnnnnnnnnnnnnnnnnnnnnnnnnnnnnnnnnnnnnnnnnnnnnnnnnnnnnnnnnnnnnnnnnnnnnnnnnnnnnnnnnnnnnnnnnnnnnnnnnnnnnnnnnnnnnnnnnnnnnnnnnnnnnnnnnnnnnnnnnnnnnnnnnnnnnnnnnnnnnnnnnnnnnnnnnnnnnnnnnnnnnnnnnnnnnnnnnnnnnnnnnnnnnnnnnnnnnnnnnnnnnnnnnnnnnnnnnnnnnnnnnnnnnnnnnnnnnnnnnnnnnnnnnnnnnnnnnnnnnnnnnnnnnnnnnnnnnnnnnnnnnnnnnnnnnnnnnnnnnnnnnnnnnnnnnnnnnnnnnnnnnnnnnnnnnnnnnnnnnnnnnnnnnnnnnnnnnnnnnnnnnnnnnnnnnnnnnnnnnnnnnnnnnnnnnnnnnnnnnnnnnnnnnnnnnnnnnnnnnnnnnnnnnnnnnnnnnnnnnnnnnnnnnnnnnnnnnnnnnnnnnnnnnnnnnnnnnnnnnnnnnnnnnnnnnnnnnnnnnnnnnnnnnnnnnnnnnnnnnnnnnnnnnnnnnnnnnnnnnnnnnnnnnnnnnnnnnnnnnnnnnnnnnnnnnnnnnnnnnnnnnnnnnnnnnnnnnnnnnnnnnnnnnnnnnnnnnnnnnnnnnnnnnnnnnnnnnnnnnnnnnnnnnnnnnnnnnnnnnnnnnnnnnnnnnnnnnnnnnnnnnnnnnnnnnnnnnnnnnnnnnnnnnnnnnnnnnnnnnnnnnnnnnnnnnnnnnnnnnnnnnnnnnnnnnnnnnnnnnnnnnnnnnnnnnnnnnnnnnnnnnnnnnnnnnnnnnnnnnnnnnnnnnnnnnnnnnnnnnnnnnnnnnnnnnnnnnnnnnnnnnnnnnnnnnnnnnnnnnnnnnnnnnnnnnnnnnnnnnnnnnnnnnnnnnnnnnnnnnnnnnnnnnnnnnnnnnnnnnnnnnnnnnnnnnnnnnnnnnnnnnnnnnnnnnnnnnnnnnnnnnnnnnnnnnnnnnnnnnnnnnnnnnnnnnnnnnnnnnnnnnnnnnnnnnnnnnnnnnnnnnnnnnnnnnnnnnnnnnnnnnnnnnnnnnnnnnnnnnnnnnnnnnnnnnnnnnnnnnnnnnnnnnnnnnnnnnnnnnnnnnnnnnnnnnnnnnnnnnnnnnnnnnnnnnnnnnnnnnnnnnnnnnnnnnnnnnnnnnnnnnnnnnnnnnnnnnnnnnnnnnnnnnnnnnnnnnnnnnnnnnnnnnnnnnnnnnnnnnnnnnnnnnnnnnnnnnnnnnnnnnnnnnnnnnnnnnnnnnnnnnnnnnnnnnnnnnnnnnnnnnnnnnnnnnnnnnnnnnnnnnnnnnnnnnnnnnnnnnnnnnnnnnnnnnnnnnnnnnnnnnnnnnnnnnnnnnnnnnnnnnnnnnnnnnnnnnnnnnnnnnnnnnnnnnnnnnnnnnnnnnnnnnnnnnnnnnnnnnnnnnnnnnnnnnnnnnnnnnnnnnnnnnnnnnnnnnnnnnnnnnnnnnnnnnnnnnnnnnnnnnnnnnnnnnnnnnnnnnnnnnnnnnnnnnnnnnnnnnnnnnnnnnnnnnnnnnnnnnnnnnnnnnnnnnnnnnnnnnnnnnnnnnnnnnnnnnnnnnnnnnnnnnnnnnnnnnnnnnnnnnnnnnnnnnnnnnnnnnnnnnnnnnnnnnnnnnnnnnnnnnnnnnnnnnnnnnnnnnnnnnnnnnnnnnnnnnnnnnnnnnnnnnnnnnnnnnnnnnnnnnnnnnnnnnnnnnnnnnnnnnnnnnnnnnnnnnnnnnnnnnnnnnnnnnnnnnnnnnnnnnnnnnnnnnnnnnnnnnnnnnnnnnnnnnnnnnnnnnnnnnnnnnnnnnnnnnnnnnnnnnnnnnnnnnnnnnnnnnnnnnnnnnnnnnnnnnnnnnnnnnnnnnnnnnnnnnnnnnnnnnnnnnnnnnnnnnnnnnnnnnnnnnnnnnnnnnnnnnnnnnnnnnnnnnnnnnnnnnnnnnnnnnnnnnnnnnnnnnnnnnnnnnnnnnnnnnnnnnnnnnnnnnnnnnnnnnnnnnnnnnnnnnnnnnnnnnnnnnnnnnnnnnnnnnnnnnnnnnnnnnnnnnnnnnnnnnnnnnnnnnnnnnnnnnnnnnnnnnnnnnnnnnnnnnnnnnnnnnnnnnnnnnnnnnnnnnnnnnnnnnnnnnnnnnnnnnnnnnnnnnnnnnnnnnnnnnnnnnnnnnnnnnnnnnnnnnnnnnnnnnnnnnnnnnnnnnnnnnnnnnnnnnnnnnnnnnnnnnnnnnnnnnnnnnnnnnnnnnnnnnnnnnnnnnnnnnnnnnnnnnnnnnnnnnnnnnnnnnnnnnnnnnnnnnnnnnnnnnnnnnnnnnnnnnnnnnnnnnnnnnnnnnnnnnnnnnnnnnnnnnnnnnnnnnnnnnnnnnnnnnnnnnnnnnnnnnnnnnnnnnnnnnnnnnnnnnnnnnnnnnnnnnnnnnnnnnnnnnnnnnnnnnnnnnnnnnnnnnnnnnnnnnnnnnnnnnnnnnnnnnnnnnnnnnnnnnnnnnnnnnnnnnnnnnnnnnnnnnnnnnnnnnnnnnnnnnnnnnnnnnnnnnnnnnnnnnnnnnnnnnnnnnnnnnnnnnnnnnnnnnnnnnnnnnnnnnnnnnnnnnnnnnnnnnnnnnnnnnnnnnnnnnnnnnnnnnnnnnnnnnnnnnnnnnnnnnnnnnnnnnnnnnnnnnnnnnnnnnnnnnnnnnnnnnnnnnnnnnnnnnnnnnnnnnnnnnnnnnnnnnnnnnnnnnnnnnnnnnnnnnnnnnnnnnnnnnnnnnnnnnnnnnnnnnnnnnnnnnnnnnnnnnnnnnnnnnnnnnnnnnnnnnnnnnnnnnnnnnnnnnnnnnnnnnnnnnnnnnnnnnnnnnnnnnnnnnnnnnnnnnnnnnnnnnnnnnnnnnnnnnnnnnnnnnnnnnnnnnnnnnnnnnnnnnnnnnnnnnnnnnnnnnnnnnnnnnnnnnnnnnnnnnnnnnnnnnnnnnnnnnnnnnnnnnnnnnnnnnnnnnnnnnnnnnnnnnnnnnnnnnnnnnnnnnnnnnnnnnnnnnnnnnnnnnnnnnnnnnnnnnnnnnnnnnnnnnnnnnnnnnnnnnnnnnnnnnnnnnnnnnnnnnnnnnnnnnnnnnnnnnnnnnnnnnnnnnnnnnnnnnnnnnnnnnnnnnnnnnnnnnnnnnnnnnnnnnnnnnnnnnnnnnnnnnnnnnnnnnnnnnnnnnnnnnnnnnnnnnnnnnnnnnnnnnnnnnnnnnnnnnnnnnnnnnnnnnnnnnnnnnnnnnnnnnnnnnnnnnnnnnnnnnnnnnnnnnnnnnnnnnnnnnnnnnnnnnnnnnnnnnnnnnnnnnnnnnnnnnnnnnnnnnnnnnnnnnnnnnnnnnnnnnnnnnnnnnnnnnnnnnnnnnnnnnnnnnnnnnnnnnnnnnnnnnnnnnnnnnnnnnnnnnnnnnnnnnnnnnnnnnnnnnnnnnnnnnnnnnnnnnnnnnnnnnnnnnnnnnnnnnnnnnnnnnnnnnnnnnnnnnnnnnnnnnnnnnnnnnnnnnnnnnnnnnnnnnnnnnnnnnnnnnnnnnnnnnnnnnnnnnnnnnnnnnnnnnnnnnnnnnnnnnnnnnnnnnnnnnnnnnnnnnnnnnnnnnnnnnnnnnnnnnnnnnnnnnnnnnnnnnnnnnnnnnnnnnnnnnnnnnnnnnnnnnnnnnnnnnnnnnnnnnnnnnnnnnnnnnnnnnnnnnnnnnnnnnnnnnnnnnnnnnnnnnnnnnnnnnnnnnnnnnnnnnnnnnnnnnnnnnnnnnnnnnnnnnnnnnnnnnnnnnnnnnnnnnnnnnnnnnnnnnnnnnnnnnnnnnnnnnnnnnnnnnnnnnnnnnnnnnnnnnnnnnnnnnnnnnnnnnnnnnnnnnnnnnnnnnnnnnnnnnnnnnnnnnnnnnnnnnnnnnnnnnnnnnnnnnnnnnnnnnnnnnnnnnnnnnnnnnnnnnnnnnnnnnnnnnnnnnnnnnnnnnnnnnnnnnnnnnnnnnnnnnnnnnnnnnnnnnnnnnnnnnnnnnnnnnnnnnnnnnnnnnnnnnnnnnnnnnnnnnnnnnnnnnnnnnnnnnnnnnnnnnnnnnnnnnnnnnnnnnnnnnnnnnnnnnnnnnnnnnnnnnnnnnnnnnnnnnnnnnnnnnnnnnnnnnnnnnnnnnnnnnnnnnnnnnnnnnnnnnnnnnnnnnnnnnnnnnnnnnnnnnnnnnnnnnnnnnnnnnnnnnnnnnnnnnnnnnnnnnnnnnnnnnnnnnnnnnnnnnnnnnnnnnnnnnnnnnnnnnnnnnnnnnnnnnnnnnnnnnnnnnnnnnnnnnnnnnnnnnnnnnnnnnnnnnnnnnnnnnnnnnnnnnnnnnnnnnnnnnnnnnnnnnnnnnnnnnnnnnnnnnnnnnnnnnnnnnnnnnnnnnnnnnnnnnnnnnnnnnnnnnnnnnnnnnnnnnnnnnnnnnnnnnnnnnnnnnnnnnnnnnnnnnnnnnnnnnnnnnnnnnnnnnnnnnnnnnnnnnnnnnnnnnnnnnnnnnnnnnnnnnnnnnnnnnnnnnnnnnnnnnnnnnnnnnnnnnnnnnnnnnnnnnnnnnnnnnnnnnnnnnnnnnnnnnnnnnnnnnnnnnnnnnnnnnnnnnnnnnnnnnnnnnnnnnnnnnnnnnnnnnnnnnnnnnnnnnnnnnnnnnnnnnnnnnnnnnnnnnnnnnnnnnnnnnnnnnnnnnnnnnnnnnnnnnnnnnnnnnnnnnnnnnnnnnnnnnnnnnnnnnnnnnnnnnnnnnnnnnnnnnnnnnnnnnnnnnnnnnnnnnnnnnnnnnnnnnnnnnnnnnnnnnnnnnnnnnnnnnnnnnnnnnnnnnnnnnnnnnnnnnnnnnnnnnnnnnnnnnnnnnnnnnnnnnnnnnnnnnnnnnnnnnnnnnnnnnnnnnnnnnnnnnnnnnnnnnnnnnnnnnnnnnnnnnnnnnnnnnnnnnnnnnnnnnnnnnnnnnnnnnnnnnnnnnnnnnnnnnnnnnnnnnnnnnnnnnnnnnnnnnnnnnnnnnnnnnnnnnnnnnnnnnnnnnnnnnnnnnnnnnnnnnnnnnnnnnnnnnnnnnnnnnnnnnnnnnnnnnnnnnnnnnnnnnnnnnnnnnnnnnnnnnnnnnnnnnnnnnnnnnnnnnnnnnnnnnnnnnnnnnnnnnnnnnnnnnnnnnnnnnnnnnnnnnnnnnnnnnnnnnnnnnnnnnnnnnnnnnnnnnnnnnnnnnnnnnnnnnnnnnnnnnnnnnnnnnnnnnnnnnnnnnnnnnnnnnnnnnnnnnnnnnnnnnnnnnnnnnnnnnnnnnnnnnnnnnnnnnnnnnnnnnnnnnnnnnnnnnnnnnnnnnnnnnnnnnnnnnnnnnnnnnnnnnnnnnnnnnnnnnnnnnnnnnnnnnnnnnnnnnnnnnnnnnnnnnnnnnnnnnnnnnnnnnnnnnnnnnnnnnnnnnnnnnnnnnnnnnnnnnnnnnnnnnnnnnnnnnnnnnnnnnnnnnnnnnnnnnnnnnnnnnnnnnnnnnnnnnnnnnnnnnnnnnnnnnnnnnnnnnnnnnnnnnnnnnnnnnnnnnnnnnnnnnnnnnnnnnnnnnnnnnnnnnnnnnnnnnnnnnnnnnnnnnnnnnnnnnnnnnnnnnnnnnnnnnnnnnnnnnnnnnnnnnnnnnnnnnnnnnnnnnnnnnnnnnnnnnnnnnnnnnnnnnnnnnnnnnnnnnnnnnnnnnnnnnnnnnnnnnnnnnnnnnnnnnnnnnnnnnnnnnnnnnnnnnnnnnnnnnnnnnnnnnnnnnnnnnnnnnnnnnnnnnnnnnnnnnnnnnnnnnnnnnnnnnnnnnnnnnnnnnnnnnnnnnnnnnnnnnnnnnnnnnnnnnnnnnnnnnnnnnnnnnnnnnnnnnnnnnnnnnnnnnnnnnnnnnnnnnnnnnnnnnnnnnnnnnnnnnnnnnnnnnnnnnnnnnnnnnnnnnnnnnnnnnnnnnnnnnnnnnnnnnnnnnnnnnnnnnnnnnnnnnnnnnnnnnnnnnnnnnnnnnnnnnnnnnnnnnnnnnnnnnnnnnnnnnnnnnnnnnnnnnnnnnnnnnnnnnnnnnnnnnnnnnnnnnnnnnnnnnnnnnnnnnnnnnnnnnnnnnnnnnnnnnnnnnnnnnnnnnnnnnnnnnnnnnnnnnnnnnnnnnnnnnnnnnnnnnnnnnnnnnnnnnnnnnnnnnnnnnnnnnnnnnnnnnnnnnnnnnnnnnnnnnnnnnnnnnnnnnnnnnnnnnnnnnnnnnnnnnnnnnnnnnnnnnnnnnnnnnnnnnnnnnnnnnnnnnnnnnnnnnnnnnnnnnnnnnnnnnnnnnnnnnnnnnnnnnnnnnnnnnnnnnnnnnnnnnnnnnnnnnnnnnnnnnnnnnnnnnnnnnnnnnnnnnnnnnnnnnnnnnnnnnnnnnnnnnnnnnnnnnnnnnnnnnnnnnnnnnnnnnnnnnnnnnnnnnnnnnnnnnnnnnnnnnnnnnnnnnnnnnnnnnnnnnnnnnnnnnnnnnnnnnnnnnnnnnnnnnnnnnnnnnnnnnnnnnnnnnnnnnnnnnnnnnnnnnnnnnnnnnnnnnnnnnnnnnnnnnnnnnnnnnnnnnnnnnnnnnnnnnnnnnnnnnnnnnnnnnnnnnnnnnnnnnnnnnnnnnnnnnnnnnnnnnnnnnnnnnnnnnnnnnnnnnnnnnnnnnnnnnnnnnnnnnnnnnnnnnnnnnnnnnnnnnnnnnnnnnnnnnnnnnnnnnnnnnnnnnnnnnnnnnnnnnnnnnnnnnnnnnnnnnnnnnnnnnnnnnnnnnnnnnnnnnnnnnnnnnnnnnnnnnnnnnnnnnnnnnnnnnnnnnnnnnnnnnnnnnnnnnnnnnnnnnnnnnnnnnnnnnnnnnnnnnnnnnnnnnnnnnnnnnnnnnnnnnnnnnnnnnnnnnnnnnnnnnnnnnnnnnnnnnnnnnnnnnnnnnnnnnnnnnnnnnnnnnnnnnnnnnnnnnnnnnnnnnnnnnnnnnnnnnnnnnnnnnnnnnnnnnnnnnnnnnnnnnnnnnnnnnnnnnnnnnnnnnnnnnnnnnnnnnnnnnnnnnnnnnnnnnnnnnnnnnnnnnnnnnnnnnnnnnnnnnnnnnnnnnnnnnnnnnnnnnnnnnnnnnnnnnnnnnnnnnnnnnnnnnnnnnnnnnnnnnnnnnnnnnnnnnnnnnnnnnnnnnnnnnnnnnnnnnnnnnnnnnnnnnnnnnnnnnnnnnnnnnnnnnnnnnnnnnnnnnnnnnnnnnnnnnnnnnnnnnnnnnnnnnnnnnnnnnnnnnnnnnnnnnnnnnnnnnnnnnnnnnnnnnnnnnnnnnnnnnnnnnnnnnnnnnnnnnnnnnnnnnnnnnnnnnnnnnnnnnnnnnnnnnnnnnnnnnnnnnnnnnnnnnnnnnnnnnnnnnnnnnnnnnnnnnnnnnnnnnnnnnnnnnnnnnnnnnnnnnnnnnnnnnnnnnnnnnnnnnnnnnnnnnnnnnnnnnnnnnnnnnnnnnnnnnnnnnnnnnnnnnnnnnnnnnnnnnnnnnnnnnnnnnnnnnnnnnnnnnnnnnnnnnnnnnnnnnnnnnnnnnnnnnnnnnnnnnnnnnnnnnnnnnnnnnnnnnnnnnnnnnnnnnnnnnnnnnnnnnnnnnnnnnnnnnnnnnnnnnnnnnnnnnnnnnnnnnnnnnnnnnnnnnnnnnnnnnnnnnnnnnnnnnnnnnnnnnnnnnnnnnnnnnnnnnnnnnnnnnnnnnnnnnnnnnnnnnnnnnnnnnnnnnnnnnnnnnnnnnnnnnnnnnnnnnnnnnnnnnnnnnnnnnnnnnnnnnnnnnnnnnnnnnnnnnnnnnnnnnnnnnnnnnnnnnnnnnnnnnnnnnnnnnnnnnnnnnnnnnnnnnnnnnnnnnnnnnnnnnnnnnnnnnnnnnnnnnnnnnnnnnnnnnnnnnnnnnnnnnnnnnnnnnnnnnnnnnnnnnnnnnnnnnnnnnnnnnnnnnnnnnnnnnnnnnnnnnnnnnnnnnnnnnnnnnnnnnnnnnnnnnnnnnnnnnnnnnnnnnnnnnnnnnnnnnnnnnnnnnnnnnnnnnnnnnnnnnnnnnnnnnnnnnnnnnnnnnnnnnnnnnnnnnnnnnnnnnnnnnnnnnnnnnnnnnnnnnnnnnnnnnnnnnnnnnnnnnnnnnnnnnnnnnnnnnnnnnnnnnnnnnnnnnnnnnnnnnnnnnnnnnnnnnnnnnnnnnnnnnnnnnnnnnnnnnnnnnnnnnnnnnnnnnnnnnnnnnnnnnnnnnnnnnnnnnnnnnnnnnnnnnnnnnnnnnnnnnnnnnnnnnnnnnnnnnnnnnnnnnnnnnnnnnnnnnnnnnnnnnnnnnnnnnnnnnnnnnnnnnnnnnnnnnnnnnnnnnnnnnnnnnnnnnnnnnnnnnnnnnnnnnnnnnnnnnnnnnnnnnnnnnnnnnnnnnnnnnnnnnnnnnnnnnnnnnnnnnnnnnnnnnnnnnnnnnnnnnnnnnnnnnnnnnnnnnnnnnnnnnnnnnnnnnnnnnnnnnnnnnnnnnnnnnnnnnnnnnnnnnnnnnnnnnnnnnnnnnnnnnnnnnnnnnnnnnnnnnnnnnnnnnnnnnnnnnnnnnnnnnnnnnnnnnnnnnnnnnnnnnnnnnnnnnnnnnnnnnnnnnnnnnnnnnnnnnnnnnnnnnnnnnnnnnnnnnnnnnnnnnnnnnnnnnnnnnnnnnnnnnnnnnnnnnnnnnnnnnnnnnnnnnnnnnnnnnnnnnnnnnnnnnnnnnnnnnnnnnnnnnnnnnnnnnnnnnnnnnnnnnnnnnnnnnnnnnnnnnnnnnnnnnnnnnnnnnnnnnnnnnnnnnnnnnnnnnnnnnnnnnnnnnnnnnnnnnnnnnnnnnnnnnnnnnnnnnnnnnnnnnnnnnnnnnnnnnnnnnnnnnnnnnnnnnnnnnnnnnnnnnnnnnnnnnnnnnnnnnnnnnnnnnnnnnnnnnnnnnnnnnnnnnnnnnnnnnnnnnnnnnnnnnnnnnnnnnnnnnnnnnnnnnnnnnnnnnnnnnnnnnnnnnnnnnnnnnnnnnnnnnnnnnnnnnnnnnnnnnnnnnnnnnnnnnnnnnnnnnnnnnnnnnnnnnnnnnnnnnnnnnnnnnnnnnnnnnnnnnnnnnnnnnnnnnnnnnnnnnnnnnnnnnnnnnnnnnnnnnnnnnnnnnnnnnnnnnnnnnnnnnnnnnnnnnnnnnnnnnnnnnnnnnnnnnnnnnnnnnnnnnnnnnnnnnnnnnnnnnnnnnnnnnnnnnnnnnnnnnnnnnnnnnnnnnnnnnnnnnnnnnnnnnnnnnnnnnnnnnnnnnnnnnnnnnnnnnnnnnnnnnnnnnnnnnnnnnnnnnnnnnnnnnnnnnnnnnnnnnnnnnnnnnnnnnnnnnnnnnnnnnnnnnnnnnnnnnnnnnnnnnnnnnnnnnnnnnnnnnnnnnnnnnnnnnnnnnnnnnnnnnnnnnnnnnnnnnnnnnnnnnnnnnnnnnnnnnnnnnnnnnnnnnnnnnnnnnnnnnnnnnnnnnnnnnnnnnnnnnnnnnnnnnnnnnnnnnnnnnnnnnnnnnnnnnnnnnnnnnnnnnnnnnnnnnnnnnnnnnnnnnnnnnnnnnnnnnnnnnnnnnnnnnnnnnnnnnnnnnnnnnnnnnnnnnnnnnnnnnnnnnnnnnnnnnnnnnnnnnnnnnnnnnnnnnnnnnnnnnnnnnnnnnnnnnnnnnnnnnnnnnnnnnnnnnnnnnnnnnnnnnnnnnnnnnnnnnnnnnnnnnnnnnnnnnnnnnnnnnnnnnnnnnnnnnnnnnnnnnnnnnnnnnnnnnnnnnnnnnnnnnnnnnnnnnnnnnnnnnnnnnnnnnnnnnnnnnnnnnnnnnnnnnnnnnnnnnnnnnnnnnnnnnnnnnnnnnnnnnnnnnnnnnnnnnnnnnnnnnnnnnnnnnnnnnnnnnnnnnnnnnnnnnnnnnnnnnnnnnnnnnnnnnnnnnnnnnnnnnnnnnnnnnnnnnnnnnnnnnnnnnnnnnnnnnnnnnnnnnnnnnnnnnnnnnnnnnnnnnnnnnnnnnnnnnnnnnnnnnnnnnnnnnnnnnnnnnnnnnnnnnnnnnnnnnnnnnnnnnnnnnnnnnnnnnnnnnnnnnnnnnnnnnnnnnnnnnnnnnnnnnnnnnnnnnnnnnnnnnnnnnnnnnnnnnnnnnnnnnnnnnnnnnnnnnnnnnnnnnnnnnnnnnnnnnnnnnnnnnnnnnnnnnnnnnnnnnnnnnnnnnnnnnnnnnnnnnnnnnnnnnnnnnnnnnnnnnnnnnnnnnnnnnnnnnnnnnnnnnnnnnnnnnnnnnnnnnnnnnnnnnnnnnnnnnnnnnnnnnnnnnnnnnnnnnnnnnnnnnnnnnnnnnnnnnnnnnnnnnnnnnnnnnnnnnnnnnnnnnnnnnnnnnnnnnnnnnnnnnnnnnnnnnnnnnnnnnnnnnnnnnnnnnnnnnnnnnnnnnnnnnnnnnnnnnnnnnnnnnnnnnnnnnnnnnnnnnnnnnnnnnnnnnnnnnnnnnnnnnnnnnnnnnnnnnnnnnnnnnnnnnnnnnnnnnnnnnnnnnnnnnnnnnnnnnnnnnnnnnnnnnnnnnnnnnnnnnnnnnnnnnnnnnnnnnnnnnnnnnnnnnnnnnnnnnnnnnnnnnnnnnnnnnnnnnnnnnnnnnnnnnnnnnnnnnnnnnnnnnnnnnnnnnnnnnnnnnnnnnnnnnnnnnnnnnnnnnnnnnnnnnnnnnnnnnnnnnnnnnnnnnnnnnnnnnnnnnnnnnnnnnnnnnnnnnnnnnnnnnnnnnnnnnnnnnnnnnnnnnnnnnnnnnnnnnnnnnnnnnnnnnnnnnnnnnnnnnnnnnnnnnnnnnnnnnnnnnnnnnnnnnnnnnnnnnnnnnnnnnnnnnnnnnnnnnnnnnnnnnnnnnnnnnnnnnnnnnnnnnnnnnnnnnnnnnnnnnnnnnnnnnnnnnnnnnnnnnnnnnnnnnnnnnnnnnnnnnnnnnnnnnnnnnnnnnnnnnnnnnnnnnnnnnnnnnnnnnnnnnnnnnnnnnnnnnnnnnnnnnnnnnnnnnnnnnnnnnnnnnnnnnnnnnnnnnnnnnnnnnnnnnnnnnnnnnnnnnnnnnnnnnnnnnnnnnnnnnnnnnnnnnnnnnnnnnnnnnnnnnnnnnnnnnnnnnnnnnnnnnnnnnnnnnnnnnnnnnnnnnnnnnnnnnnnnnnnnnnnnnnnnnnnnnnnnnnnnnnnnnnnnnnnnnnnnnnnnnnnnnnnnnnnnnnnnnnnnnnnnnnnnnnnnnnnnnnnnnnnnnnnnnnnnnnnnnnnnnnnnnnnnnnnnnnnnnnnnnnnnnnnnnnnnnnnnnnnnnnnnnnnnnnnnnnnnnnnnnnnnnnnnnnnnnnnnnnnnnnnnnnnnnnnnnnnnnnnnnnnnnnnnnnnnnnnnnnnnnnnnnnnnnnnnnnnnnnnnnnnnnnnnnnnnnnnnnnnnnnnnnnnnnnnnnnnnnnnnnnnnnnnnnnnnnnnnnnnnnnnnnnnnnnnnnnnnnnnnnnnnnnnnnnnnnnnnnnnnnnnnnnnnnnnnnnnnnnnnnnnnnnnnnnnnnnnnnnnnnnnnnnnnnnnnnnnnnnnnnnnnnnnnnnnnnnnnnnnnnnnnnnnnnnnnnnnnnnnnnnnnnnnnnnnnnnnnnnnnnnnnnnnnnnnnnnnnnnnnnnnnnnnnnnnnnnnnnnnnnnnnnnnnnnnnnnnnnnnnnnnnnnnnnnnnnnnnnnnnnnnnnnnnnnnnnnnnnnnnnnnnnnnnnnnnnnnnnnnnnnnnnnnnnnnnnnnnnnnnnnnnnnnnnnnnnnnnnnnnnnnnnnnnnnnnnnnnnnnnnnnnnnnnnnnnnnnnnnnnnnnnnnnnnnnnnnnnnnnnnnnnnnnnnnnnnnnnnnnnnnnnnnnnnnnnnnnnnnnnnnnnnnnnnnnnnnnnnnnnnnnnnnnnnnnnnnnnnnnnnnnnnnnnnnnnnnnnnnnnnnnnnnnnnnnnnnnnnnnnnnnnnnnnnnnnnnnnnnnnnnnnnnnnnnnnnnnnnnnnnnnnnnnnnnnnnnnnnnnnnnnnnnnnnnnnnnnnnnnnnnnnnnnnnnnnnnnnnnnnnnnnnnnnnnnnnnnnnnnnnnnnnnnnnnnnnnnnnnnnnnnnnnnnnnnnnnnnnnnnnnnnnnnnnnnnnnnnnnnnnnnnnnnnnnnnnnnnnnnnnnnnnnnnnnnnnnnnnnnnnnnnnnnnnnnnnnnnnnnnnnnnnnnnnnnnnnnnnnnnnnnnnnnnnnnnnnnnnnnnnnnnnnnnnnnnnnnnnnnnnnnnnnnnnnnnnnnnnnnnnnnnnnnnnnnnnnnnnnnnnnnnnnnnnnnnnnnnnnnnnnnnnnnnnnnnnnnnnnnnnnnnnnnnnnnnnnnnnnnnnnnnnnnnnnnnnnnnnnnnnnnnnnnnnnnnnnnnnnnnnnnnnnnnnnnnnnnnnnnnnnnnnnnnnnnnnnnnnnnnnnnnnnnnnnnnnnnnnnnnnnnnnnnnnnnnnnnnnnnnnnnnnnnnnnnnnnnnnnnnnnnnnnnnnnnnnnnnnnnnnnnnnnnnnnnnnnnnnnnnnnnnnnnnnnnnnnnnnnnnnnnnnnnnnnnnnnnnnnnnnnnnnnnnnnnnnnnnnnnnnnnnnnnnnnnnnnnnnnnnnnnnnnnnnnnnnnnnnnnnnnnnnnnnnnnnnnnnnnnnnnnnnnnnnnnnnnnnnnnnnnnnnnnnnnnnnnnnnnnnnnnnnnnnnnnnnnnnnnnnnnnnnnnnnnnnnnnnnnnnnnnnnnnnnnnnnnnnnnnnnnnnnnnnnnnnnnnnnnnnnnnnnnnnnnnnnnnnnnnnnnnnnnnnnnnnnnnnnnnnnnnnnnnnnnnnnnnnnnnnnnnnnnnnnnnnnnnnnnnnnnnnnnnnnnnnnnnnnnnnnnnnnnnnnnnnnnnnnnnnnnnnnnnnnnnnnnnnnnnnnnnnnnnnnnnnnnnnnnnnnnnnnnnnnnnnnnnnnnnnnnnnnnnnnnnnnnnnnnnnnnnnnnnnnnnnnnnnnnnnnnnnnnnnnnnnnnnnnnnnnnnnnnnnnnnnnnnnnnnnnnnnnnnnnnnnnnnnnnnnnnnnnnnnnnnnnnnnnnnnnnnnnnnnnnnnnnnnnnnnnnnnnnnnnnnnnnnnnnnnnnnnnnnnnnnnnnnnnnnnnnnnnnnnnnnnnnnnnnnnnnnnnnnnnnnnnnnnnnnnnnnnnnnnnnnnnnnnnnnnnnnnnnnnnnnnnnnnnnnnnnnnnnnnnnnnnnnnnnnnnnnnnnnnnnnnnnnnnnnnnnnnnnnnnnnnnnnnnnnnnnnnnnnnnnnnnnnnnnnnnnnnnnnnnnnnnnnnnnnnnnnnnnnnnnnnnnnnnnnnnnnnnnnnnnnnnnnnnnnnnnnnnnnnnnnnnnnnnnnnnnnnnnnnnnnnnnnnnnnnnnnnnnnnnnnnnnnnnnnnnnnnnnnnnnnnnnnnnnnnnnnnnnnnnnnnnnnnnnnnnnnnnnnnnnnnnnnnnnnnnnnnnnnnnnnnnnnnnnnnnnnnnnnnnnnnnnnnnnnnnnnnnnnnnnnnnnnnnnnnnnnnnnnnnnnnnnnnnnnnnnnnnnnnnnnnnnnnnnnnnnnnnnnnnnnnnnnnnnnnnnnnnnnnnnnnnnnnnnnnnnnnnnnnnnnnnnnnnnnnnnnnnnnnnnnnnnnnnnnnnnnnnnnnnnnnnnnnnnnnnnnnnnnnnnnnnnnnnnnnnnnnnnnnnnnnnnnnnnnnnnnnnnnnnnnnnnnnnnnnnnnnnnnnnnnnnnnnnnnnnnnnnnnnnnnnnnnnnnnnnnnnnnnnnnnnnnnnnnnnnnnnnnnnnnnnnnnnnnnnnnnnnnnnnnnnnnnnnnnnnnnnnnnnnnnnnnnnnnnnnnnnnnnnnnnnnnnnnnnnnnnnnnnnnnnnnnnnnnnnnnnnnnnnnnnnnnnnnnnnnnnnnnnnnnnnnnnnnnnnnnnnnnnnnnnnnnnnnnnnnnnnnnnnnnnnnnnnnnnnnnnnnnnnnnnnnnnnnnnnnnnnnnnnnnnnnnnnnnnnnnnnnnnnnnnnnnnnnnnnnnnnnnnnnnnnnnnnnnnnnnnnnnnnnnnnnnnnnnnnnnnnnnnnnnnnnnnnnnnnnnnnnnnnnnnnnnnnnnnnnnnnnnnnnnnnnnnnnnnnnnnnnnnnnnnnnnnnnnnnnnnnnnnnnnnnnnnnnnnnnnnnnnnnnnnnnnnnnnnnnnnnnnnnnnnnnnnnnnnnnnnnnnnnnnnnnnnnnnnnnnnnnnnnnnnnnnnnnnnnnnnnnnnnnnnnnnnnnnnnnnnnnnnnnnnnnnnnnnnnnnnnnnnnnnnnnnnnnnnnnnnnnnnnnnnnnnnnnnnnnnnnnnnnnnnnnnnnnnnnnnnnnnnnnnnnnnnnnnnnnnnnnnnnnnnnnnnnnnnnnnnnnnnnnnnnnnnnnnnnnnnnnnnnnnnnnnnnnnnnnnnnnnnnnnnnnnnnnnnnnnnnnnnnnnnnnnnnnnnnnnnnnnnnnnnnnnnnnnnnnnnnnnnnnnnnnnnnnnnnnnnnnnnnnnnnnnnnnnnnnnnnnnnnnnnnnnnnnnnnnnnnnnnnnnnnnnnnnnnnnnnnnnnnnnnnnnnnnnnnnnnnnnnnnnnnnnnnnnnnnnnnnnnnnnnnnnnnnnnnnnnnnnnnnnnnnnnnnnnnnnnnnnnnnnnnnnnnnnnnnnnnnnnnnnnnnnnnnnnnnnnnnnnnnnnnnnnnnnnnnnnnnnnnnnnnnnnnnnnnnnnnnnnnnnnnnnnnnnnnnnnnnnnnnnnnnnnnnnnnnnnnnnnnnnnnnnnnnnnnnnnnnnnnnnnnnnnnnnnnnnnnnnnnnnnnnnnnnnnnnnnnnnnnnnnnnnnnnnnnnnnnnnnnnnnnnnnnnnnnnnnnnnnnnnnnnnnnnnnnnnnnnnnnnnnnnnnnnnnnnnnnnnnnnnnnnnnnnnnnnnnnnnnnnnnnnnnnnnnnnnnnnnnnnnnnnnnnnnnnnnnnnnnnnnnnnnnnnnnnnnnnnnnnnnnnnnnnnnnnnnnnnnnnnnnnnnnnnnnnnnnnnnnnnnnnnnnnnnnnnnnnnnnnnnnnnnnnnnnnnnnnnnnnnnnnnnnnnnnnnnnnnnnnnnnnnnnnnnnnnnnnnnnnnnnnnnnnnnnnnnnnnnnnnnnnnnnnnnnnnnnnnnnnnnnnnnnnnnnnnnnnnnnnnnnnnnnnnnnnnnnnnnnnnnnnnnnnnnnnnnnnnnnnnnnnnnnnnnnnnnnnnnnnnnnnnnnnnnnnnnnnnnnnnnnnnnnnnnnnnnnnnnnnnnnnnnnnnnnnnnnnnnnnnnnnnnnnnnnnnnnnnnnnnnnnnnnnnnnnnnnnnnnnnnnnnnnnnnnnnnnnnnnnnnnnnnnnnnnnnnnnnnnnnnnnnnnnnnnnnnnnnnnnnnnnnnnnnnnnnnnnnnnnnnnnnnnnnnnnnnnnnnnnnnnnnnnnnnnnnnnnnnnnnnnnnnnnnnnnnnnnnnnnnnnnnnnnnnnnnnnnnnnnnnnnnnnnnnnnnnnnnnnnnnnnnnnnnnnnnnnnnnnnnnnnnnnnnnnnnnnnnnnnnnnnnnnnnnnnnnnnnnnnnnnnnnnnnnnnnnnnnnnnnnnnnnnnnnnnnnnnnnnnnnnnnnnnnnnnnnnnnnnnnnnnnnnnnnnnnnnnnnnnnnnnnnnnnnnnnnnnnnnnnnnnnnnnnnnnnnnnnnnnnnnnnnnnnnnnnnnnnnnnnnnnnnnnnnnnnnnnnnnnnnnnnnnnnnnnnnnnnnnnnnnnnnnnnnnnnnnnnnnnnnnnnnnnnnnnnnnnnnnnnnnnnnnnnnnnnnnnnnnnnnnnnnnnnnnnnnnnnnnnnnnnnnnnnnnnnnnnnnnnnnnnnnnnnnnnnnnnnnnnnnnnnnnnnnnnnnnnnnnnnnnnnnnnnnnnnnnnnnnnnnnnnnnnnnnnnnnnnnnnnnnnnnnnnnnnnnnnnnnnnnnnnnnnnnnnnnnnnnnnnnnnnnnnnnnnnnnnnnnnnnnnnnnnnnnnnnnnnnnnnnnnnnnnnnnnnnnnnnnnnnnnnnnnnnnnnnnnnnnnnnnnnnnnnnnnnnnnnnnnnnnnnnnnnnnnnnnnnnnnnnnnnnnnnnnnnnnnnnnnnnnnnnnnnnnnnnnnnnnnnnnnnnnnnnnnnnnnnnnnnnnnnnnnnnnnnnnnnnnnnnnnnnnnnnnnnnnnnnnnnnnnnnnnnnnnnnnnnnnnnnnnnnnnnnnnnnnnnnnnnnnnnnnnnnnnnnnnnnnnnnnnnnnnnnnnnnnnnnnnnnnnnnnnnnnnnnnnnnnnnnnnnnnnnnnnnnnnnnnnnnnnnnnnnnnnnnnnnnnnnnnnnnnnnnnnnnnnnnnnnnnnnnnnnnnnnnnnnnnnnnnnnnnnnnnnnnnnnnnnnnnnnnnnnnnnnnnnnnnnnnnnnnnnnnnnnnnnnnnnnnnnnnnnnnnnnnnnnnnnnnnnnnnnnnnnnnnnnnnnnnnnnnnnnnnnnnnnnnnnnnnnnnnnnnnnnnnnnnnnnnnnnnnnnnnnnnnnnnnnnnnnnnnnnnnnnnnnnnnnnnnnnnnnnnnnnnnnnnnnnnnnnnnnnnnnnnnnnnnnnnnnnnnnnnnnnnnnnnnnnnnnnnnnnnnnnnnnnnnnnnnnnnnnnnnnnnnnnnnnnnnnnnnnnnnnnnnnnnnnnnnnnnnnnnnnnnnnnnnnnnnnnnnnnnnnnnnnnnnnnnnnnnnnnnnnnnnnnnnnnnnnnnnnnnnnnnnnnnnnnnnnnnnnnnnnnnnnnnnnnnnnnnnnnnnnnnnnnnnnnnnnnnnnnnnnnnnnnnnnnnnnnnnnnnnnnnnnnnnnnnnnnnnnnnnnnnnnnnnnnnnnnnnnnnnnnnnnnnnnnnnnnnnnnnnnnnnnnnnnnnnnnnnnnnnnnnnnnnnnnnnnnnnnnnnnnnnnnnnnnnnnnnnnnnnnnnnnnnnnnnnnnnnnnnnnnnnnnnnnnnnnnnnnnnnnnnnnnnnnnnnnnnnnnnnnnnnnnnnnnnnnnnnnnnnnnnnnnnnnnnnnnnnnnnnnnnnnnnnnnnnnnnnnnnnnnnnnnnnnnnnnnnnnnnnnnnnnnnnnnnnnnnnnnnnnnnnnnnnnnnnnnnnnnnnnnnnnnnnnnnnnnnnnnnnnnnnnnnnnnnnnnnnnnnnnnnnnnnnnnnnnnnnnnnnnnnnnnnnnnnnnnnnnnnnnnnnnnnnnnnnnnnnnnnnnnnnnnnnnnnnnnnnnnnnnnnnnnnnnnnnnnnnnnnnnnnnnnnnnnnnnnnnnnnnnnnnnnnnnnnnnnnnnnnnnnnnnnnnnnnnnnnnnnnnnnnnnnnnnnnnnnnnnnnnnnnnnnnnnnnnnnnnnnnnnnnnnnnnnnnnnnnnnnnnnnnnnnnnnnnnnnnnnnnnnnnnnnnnnnnnnnnnnnnnnnnnnnnnnnnnnnnnnnnnnnnnnnnnnnnnnnnnnnnnnnnnnnnnnnnnnnnnnnnnnnnnnnnnnnnnnnnnnnnnnnnnnnnnnnnnnnnnnnnnnnnnnnnnnnnnnnnnnnnnnnnnnnnnnnnnnnnnnnnnnnnnnnnnnnnnnnnnnnnnnnnnnnnnnnnnnnnnnnnnnnnnnnnnnnnnnnnnnnnnnnnnnnnnnnnnnnnnnnnnnnnnnnnnnnnnnnnnnnnnnnnnnnnnnnnnnnnnnnnnnnnnnnnnnnnnnnnnnnnnnnnnnnnnnnnnnnnnnnnnnnnnnnnnnnnnnnnnnnnnnnnnnnnnnnnnnnnnnnnnnnnnnnnnnnnnnnnnnnnnnnnnnnnnnnnnnnnnnnnnnnnnnnnnnnnnnnnnnnnnnnnnnnnnnnnnnnnnnnnnnnnnnnnnnnnnnnnnnnnnnnnnnnnnnnnnnnnnnnnnnnnnnnnnnnnnnnnnnnnnnnnnnnnnnnnnnnnnnnnnnnnnnnnnnnnnnnnnnnnnnnnnnnnnnnnnnnnnnnnnnnnnnnnnnnnnnnnnnnnnnnnnnnnnnnnnnnnnnnnnnnnnnnnnnnnnnnnnnnnnnnnnnnnnnnnnnnnnnnnnnnnnnnnnnnnnnnnnnnnnnnnnnnnnnnnnnnnnnnnnnnnnnnnnnnnnnnnnnnnnnnnnnnnnnnnnnnnnnnnnnnnnnnnnnnnnnnnnnnnnnnnnnnnnnnnnnnnnnnnnnnnnnnnnnnnnnnnnnnnnnnnnnnnnnnnnnnnnnnnnnnnnnnnnnnnnnnnnnnnnnnnnnnnnnnnnnnnnnnnnnnnnnnnnnnnnnnnnnnnnnnnnnnnnnnnnnnnnnnnnnnnnnnnnnnnnnnnnnnnnnnnnnnnnnnnnnnnnnnnnnnnnnnnnnnnnnnnnnnnnnnnnnnnnnnnnnnnnnnnnnnnnnnnnnnnnnnnnnnnnnnnnnnnnnnnnnnnnnnnnnnnnnnnnnnnnnnnnnnnnnnnnnnnnnnnnnnnnnnnnnnnnnnnnnnnnnnnnnnnnnnnnnnnnnnnnnnnnnnnnnnnnnnnnnnnnnnnnnnnnnnnnnnnnnnnnnnnnnnnnnnnnnnnnnnnnnnnnnnnnnnnnnnnnnnnnnnnnnnnnnnnnnnnnnnnnnnnnnnnnnnnnnnnnnnnnnnnnnnnnnnnnnnnnnnnnnnnnnnnnnnnnnnnnnnnnnnnnnnnnnnnnnnnnnnnnnnnnnnnnnnnnnnnnnnnnnnnnnnnnnnnnnnnnnnnnnnnnnnnnnnnnnnnnnnnnnnnnnnnnnnnnnnnnnnnnnnnnnnnnnnnnnnnnnnnnnnnnnnnnnnnnnnnnnnnnnnnnnnnnnnnnnnnnnnnnnnnnnnnnnnnnnnnnnnnnnnnnnnnnnnnnnnnnnnnnnnnnnnnnnnnnnnnnnnnnnnnnnnnnnnnnnnnnnnnnnnnnnnnnnnnnnnnnnnnnnnnnnnnnnnnnnnnnnnnnnnnnnnnnnnnnnnnnnnnnnnnnnnnnnnnnnnnnnnnnnnnnnnnnnnnnnnnnnnnnnnnnnnnnnnnnnnnnnnnnnnnnnnnnnnnnnnnnnnnnnnnnnnnnnnnnnnnnnnnnnnnnnnnnnnnnnnnnnnnnnnnnnnnnnnnnnnnnnnnnnnnnnnnnnnnnnnnnnnnnnnnnnnnnnnnnnnnnnnnnnnnnnnnnnnnnnnnnnnnnnnnnnnnnnnnnnnnnnnnnnnnnnnnnnnnnnnnnnnnnnnnnnnnnnnnnnnnnnnnnnnnnnnnnnnnnnnnnnnnnnnnnnnnnnnnnnnnnnnnnnnnnnnnnnnnnnnnnnnnnnnnnnnnnnnnnnnnnnnnnnnnnnnnnnnnnnnnnnnnnnnnnnnnnnnnnnnnnnnnnnnnnnnnnnnnnnnnnnnnnnnnnnnnnnnnnnnnnnnnnnnnnnnnnnnnnnnnnnnnnnnnnnnnnnnnnnnnnnnnnnnnnnnnnnnnnnnnnnnnnnnnnnnnnnnnnnnnnnnnnnnnnnnnnnnnnnnnnnnnnnnnnnnnnnnnnnnnnnnnnnnnnnnnnnnnnnnnnnnnnnnnnnnnnnnnnnnnnnnnnnnnnnnnnnnnnnnnnnnnnnnnnnnnnnnnnnnnnnnnnnnnnnnnnnnnnnnnnnnnnnnnnnnnnnnnnnnnnnnnnnnnnnnnnnnnnnnnnnnnnnnnnnnnnnnnnnnnnnnnnnnnnnnnnnnnnnnnnnnnnnnnnnnnnnnnnnnnnnnnnnnnnnnnnnnnnnnnnnnnnnnnnnnnnnnnnnnnnnnnnnnnnnnnnnnnnnnnnnnnnnnnnnnnnnnnnnnnnnnnnnnnnnnnnnnnnnnnnnnnnnnnnnnnnnnnnnnnnnnnnnnnnnnnnnnnnnnnnnnnnnnnnnnnnnnnnnnnnnnnnnnnnnnnnnnnnnnnnnnnnnnnnnnnnnnnnnnnnnnnnnnnnnnnnnnnnnnnnnnnnnnnnnnnnnnnnnnnnnnnnnnnnnnnnnnnnnnnnnnnnnnnnnnnnnnnnnnnnnnnnnnnnnnnnnnnnnnnnnnnnnnnnnnnnnnnnnnnnnnnnnnnnnnnnnnnnnnnnnnnnnnnnnnnnnnnnnnnnnnnnnnnnnnnnnnnnnnnnnnnnnnnnnnnnnnnnnnnnnnnnnnnnnnnnnnnnnnnnnnnnnnnnnnnnnnnnnnnnnnnnnnnnnnnnnnnnnnnnnnnnnnnnnnnnnnnnnnnnnnnnnnnnnnnnnnnnnnnnnnnnnnnnnnnnnnnnnnnnnnnnnnnnnnnnnnnnnnnnnnnnnnnnnnnnnnnnnnnnnnnnnnnnnnnnnnnnnnnnnnnnnnnnnnnnnnnnnnnnnnnnnnnnnnnnnnnnnnnnnnnnnnnnnnnnnnnnnnnnnnnnnnnnnnnnnnnnnnnnnnnnnnnnnnnnnnnnnnnnnnnnnnnnnnnnnnnnnnnnnnnnnnnnnnnnnnnnnnnnnnnnnnnnnnnnnnnnnnnnnnnnnnnnnnnnnnnnnnnnnnnnnnnnnnnnnnnnnnnnnnnnnnnnnnnnnnnnnnnnnnnnnnnnnnnnnnnnnnnnnnnnnnnnnnnnnnnnnnnnnnnnnnnnnnnnnnnnnnnnnnnnnnnnnnnnnnnnnnnnnnnnnnnnnnnnnnnnnnnnnnnnnnnnnnnnnnnnnnnnnnnnnnnnnnnnnnnnnnnnnnnnnnnnnnnnnnnnnnnnnnnnnnnnnnnnnnnnnnnnnnnnnnnnnnnnnnnnnnnnnnnnnnnnnnnnnnnnnnnnnnnnnnnnnnnnnnnnnnnnnnnnnnnnnnnnnnnnnnnnnnnnnnnnnnnnnnnnnnnnnnnnnnnnnnnnnnnnnnnnnnnnnnnnnnnnnnnnnnnnnnnnnnnnnnnnnnnnnnnnnnnnnnnnnnnnnnnnnnnnnnnnnnnnnnnnnnnnnnnnnnnnnnnnnnnnnnnnnnnnnnnnnnnnnnnnnnnnnnnnnnnnnnnnnnnnnnnnnnnnnnnnnnnnnnnnnnnnnnnnnnnnnnnnnnnnnnnnnnnnnnnnnnnnnnnnnnnnnnnnnnnnnnnnnnnnnnnnnnnnnnnnnnnnnnnnnnnnnnnnnnnnnnnnnnnnnnnnnnnnnnnnnnnnnnnnnnnnnnnnnnnnnnnnnnnnnnnnnnnnnnnnnnnnnnnnnnnnnnnnnnnnnnnnnnnnnnnnnnnnnnnnnnnnnnnnnnnnnnnnnnnnnnnnnnnnnnnnnnnnnnnnnnnnnnnnnnnnnnnnnnnnnnnnnnnnnnnnnnnnnnnnnnnnnnnnnnnnnnnnnnnnnnnnnnnnnnnnnnnnnnnnnnnnnnnnnnnnnnnnnnnnnnnnnnnnnnnnnnnnnnnnnnnnnnnnnnnnnnnnnnnnnnnnnnnnnnnnnnnnnnnnnnnnnnnnnnnnnnnnnnnnnnnnnnnnnnnnnnnnnnnnnnnnnnnnnnnnnnnnnnnnnnnnnnnnnnnnnnnnnnnnnnnnnnnnnnnnnnnnnnnnnnnnnnnnnnnnnnnnnnnnnnnnnnnnnnnnnnnnnnnnnnnnnnnnnnnnnnnnnnnnnnnnnnnnnnnnnnnnnnnnnnnnnnnnnnnnnnnnnnnnnnnnnnnnnnnnnnnnnnnnnnnnnnnnnnnnnnnnnnnnnnnnnnnnnnnnnnnnnnnnnnnnnnnnnnnnnnnnnnnnnnnnnnnnnnnnnnnnnnnnnnnnnnnnnnnnnnnnnnnnnnnnnnnnnnnnnnnnnnnnnnnnnnnnnnnnnnnnnnnnnnnnnnnnnnnnnnnnnnnnnnnnnnnnnnnnnnnnnnnnnnnnnnnnnnnnnnnnnnnnnnnnnnnnnnnnnnnnnnnnnnnnnnnnnnnnnnnnnnnnnnnnnnnnnnnnnnnnnnnnnnnnnnnnnnnnnnnnnnnnnnnnnnnnnnnnnnnnnnnnnnnnnnnnnnnnnnnnnnnnnnnnnnnnnnnnnnnnnnnnnnnnnnnnnnnnnnnnnnnnnnnnnnnnnnnnnnnnnnnnnnnnnnnnnnnnnnnnnnnnnnnnnnnnnnnnnnnnnnnnnnnnnnnnnnnnnnnnnnnnnnnnnnnnnnnnnnnnnnnnnnnnnnnnnnnnnnnnnnnnnnnnnnnnnnnnnnnnnnnnnnnnnnnnnnnnnnnnnnnnnnnnnnnnnnnnnnnnnnnnnnnnnnnnnnnnnnnnnnnnnnnnnnnnnnnnnnnnnnnnnnnnnnnnnnnnnnnnnnnnnnnnnnnnnnnnnnnnnnnnnnnnnnnnnnnnnnnnnnnnnnnnnnnnnnnnnnnnnnnnnnnnnnnnnnnnnnnnnnnnnnnnnnnnnnnnnnnnnnnnnnnnnnnnnnnnnnnnnnnnnnnnnnnnnnnnnnnnnnnnnnnnnnnnnnnnnnnnnnnnnnnnnnnnnnnnnnnnnnnnnnnnnnnnnnnnnnnnnnnnnnnnnnnnnnnnnnnnnnnnnnnnnnnnnnnnnnnnnnnnnnnnnnnnnnnnnnnnnnnnnnnnnnnnnnnnnnnnnnnnnnnnnnnnnnnnnnnnnnnnnnnnnnnnnnnnnnnnnnnnnnnnnnnnnnnnnnnnnnnnnnnnnnnnnnnnnnnnnnnnnnnnnnnnnnnnnnnnnnnnnnnnnnnnnnnnnnnnnnnnnnnnnnnnnnnnnnnnnnnnnnnnnnnnnnnnnnnnnnnnnnnnnnnnnnnnnnnnnnnnnnnnnnnnnnnnnnnnnnnnnnnnnnnnnnnnnnnnnnnnnnnnnnnnnnnnnnnnnnnnnnnnnnnnnnnnnnnnnnnnnnnnnnnnnnnnnnnnnnnnnnnnnnnnnnnnnnnnnnnnnnnnnnnnnnnnnnnnnnnnnnnnnnnnnnnnnnnnnnnnnnnnnnnnnnnnnnnnnnnnnnnnnnnnnnnnnnnnnnnnnnnnnnnnnnnnnnnnnnnnnnnnnnnnnnnnnnnnnnnnnnnnnnnnnnnnnnnnnnnnnnnnnnnnnnnnnnnnnnnnnnnnnnnnnnnnnnnnnnnnnnnnnnnnnnnnnnnnnnnnnnnnnnnnnnnnnnnnnnnnnnnnnnnnnnnnnnnnnnnnnnnnnnnnnnnnnnnnnnnnnnnnnnnnnnnnnnnnnnnnnnnnnnnnnnnnnnnnnnnnnnnnnnnnnnnnnnnnnnnnnnnnnnnnnnnnnnnnnnnnnnnnnnnnnnnnnnnnnnnnnnnnnnnnnnnnnnnnnnnnnnnnnnnnnnnnnnnnnnnnnnnnnnnnnnnnnnnnnnnnnnnnnnnnnnnnnnnnnnnnnnnnnnnnnnnnnnnnnnnnnnnnnnnnnnnnnnnnnnnnnnnnnnnnnnnnnnnnnnnnnnnnnnnnnnnnnnnnnnnnnnnnnnnnnnnnnnnnnnnnnnnnnnnnnnnnnnnnnnnnnnnnnnnnnnnnnnnnnnnnnnnnnnnnnnnnnnnnnnnnnnnnnnnnnnnnnnnnnnnnnnnnnnnnnnnnnnnnnnnnnnnnnnnnnnnnnnnnnnnnnnnnnnnnnnnnnnnnnnnnnnnnnnnnnnnnnnnnnnnnnnnnnnnnnnnnnnnnnnnnnnnnnnnnnnnnnnnnnnnnnnnnnnnnnnnnnnnnnnnnnnnnnnnnnnnnnnnnnnnnnnnnnnnnnnnnnnnnnnnnnnnnnnnnnnnnnnnnnnnnnnnnnnnnnnnnnnnnnnnnnnnnnnnnnnnnnnnnnnnnnnnnnnnnnnnnnnnnnnnnnnnnnnnnnnnnnnnnnnnnnnnnnnnnnnnnnnnnnnnnnnnnnnnnnnnnnnnnnnnnnnnnnnnnnnnnnnnnnnnnnnnnnnnnnnnnnnnnnnnnnnnnnnnnnnnnnnnnnnnnnnnnnnnnnnnnnnnnnnnnnnnnnnnnnnnnnnnnnnnnnnnnnnnnnnnnnnnnnnnnnnnnnnnnnnnnnnnnnnnnnnnnnnnnnnnnnnnnnnnnnnnnnnnnnnnnnnnnnnnnnnnnnnnnnnnnnnnnnnnnnnnnnnnnnnnnnnnnnnnnnnnnnnnnnnnnnnnnnnnnnnnnnnnnnnnnnnnnnnnnnnnnnnnnnnnnnnnnnnnnnnnnnnnnnnnnnnnnnnnnnnnnnnnnnnnnnnnnnnnnnnnnnnnnnnnnnnnnnnnnnnnnnnnnnnnnnnnnnnnnnnnnnnnnnnnnnnnnnnnnnnnnnnnnnnnnnnnnnnnnnnnnnnnnnnnnnnnnnnnnnnnnnnnnnnnnnnnnnnnnnnnnnnnnnnnnnnnnnnnnnnnnnnnnnnnnnnnnnnnnnnnnnnnnnnnnnnnnnnnnnnnnnnnnnnnnnnnnnnnnnnnnnnnnnnnnnnnnnnnnnnnnnnnnnnnnnnnnnnnnnnnnnnnnnnnnnnnnnnnnnnnnnnnnnnnnnnnnnnnnnnnnnnnnnnnnnnnnnnnnnnnnnnnnnnnnnnnnnnnnnnnnnnnnnnnnnnnnnnnnnnnnnnnnnnnnnnnnnnnnnnnnnnnnnnnnnnnnnnnnnnnnnnnnnnnnnnnnnnnnnnnnnnnnnnnnnnnnnnnnnnnnnnnnnnnnnnnnnnnnnnnnnnnnnnnnnnnnnnnnnnnnnnnnnnnnnnnnnnnnnnnnnnnnnnnnnnnnnnnnnnnnnnnnnnnnnnnnnnnnnnnnnnnnnnnnnnnnnnnnnnnnnnnnnnnnnnnnnnnnnnnnnnnnnnnnnnnnnnnnnnnnnnnnnnnnnnnnnnnnnnnnnnnnnnnnnnnnnnnnnnnnnnnnnnnnnnnnnnnnnnnnnnnnnnnnnnnnnnnnnnnnnnnnnnnnnnnnnnnnnnnnnnnnnnnnnnnnnnnnnnnnnnnnnnnnnnnnnnnnnnnnnnnnnnnnnnnnnnnnnnnnnnnnnnnnnnnnnnnnnnnnnnnnnnnnnnnnnnnnnnnnnnnnnnnnnnnnnnnnnnnnnnnnnnnnnnnnnnnnnnnnnnnnnnnnnnnnnnnnnnnnnnnnnnnnnnnnnnnnnnnnnnnnnnnnnnnnnnnnnnnnnnnnnnnnnnnnnnnnnnnnnnnnnnnnnnnnnnnnnnnnnnnnnnnnnnnnnnnnnnnnnnnnnnnnnnnnnnnnnnnnnnnnnnnnnnnnnnnnnnnnnnnnnnnnnnnnnnnnnnnnnnnnnnnnnnnnnnnnnnnnnnnnnnnnnnnnnnnnnnnnnnnnnnnnnnnnnnnnnnnnnnnnnnnnnnnnnnnnnnnnnnnnnnnnnnnnnnnnnnnnnnnnnnnnnnnnnnnnnnnnnnnnnnnnnnnnnnnnnnnnnnnnnnnnnnnnnnnnnnnnnnnnnnnnnnnnnnnnnnnnnnnnnnnnnnnnnnnnnnnnnnnnnnnnnnnnnnnnnnnnnnnnnnnnnnnnnnnnnnnnnnnnnnnnnnnnnnnnnnnnnnnnnnnnnnnnnnnnnnnnnnnnnnnnnnnnnnnnnnnnnnnnnnnnnnnnnnnnnnnnnnnnnnnnnnnnnnnnnnnnnnnnnnnnnnnnnnnnnnnnnnnnnnnnnnnnnnnnnnnnnnnnnnnnnnnnnnnnnnnnnnnnnnnnnnnnnnnnnnnnnnnnnnnnnnnnnnnnnnnnnnnnnnnnnnnnnnnnnnnnnnnnnnnnnnnnnnnnnnnnnnnnnnnnnnnnnnnnnnnnnnnnnnnnnnnnnnnnnnnnnnnnnnnnnnnnnnnnnnnnnnnnnnnnnnnnnnnnnnnnnnnnnnnnnnnnnnnnnnnnnnnnnnnnnnnnnnnnnnnnnnnnnnnnnnnnnnnnnnnnnnnnnnnnnnnnnnnnnnnnnnnnnnnnnnnnnnnnnnnnnnnnnnnnnnnnnnnnnnnnnnnnnnnnnnnnnnnnnnnnnnnnnnnnnnnnnnnnnnnnnnnnnnnnnnnnnnnnnnnnnnnnnnnnnnnnnnnnnnnnnnnnnnnnnnnnnnnnnnnnnnnnnnnnnnnnnnnnnnnnnnnnnnnnnnnnnnnnnnnnnnnnnnnnnnnnnnnnnnnnnnnnnnnnnnnnnnnnnnnnnnnnnnnnnnnnnnnnnnnnnnnnnnnnnnnnnnnnnnnnnnnnnnnnnnnnnnnnnnnnnnnnnnnnnnnnnnnnnnnnnnnnnnnnnnnnnnnnnnnnnnnnnnnnnnnnnnnnnnnnnnnnnnnnnnnnnnnnnnnnnnnnnnnnnnnnnnnnnnnnnnnnnnnnnnnnnnnnnnnnnnnnnnnnnnnnnnnnnnnnnnnnnnnnnnnnnnnnnnnnnnnnnnnnnnnnnnnnnnnnnnnnnnnnnnnnnnnnnnnnnnnnnnnnnnnnnnnnnnnnnnnnnnnnnnnnnnnnnnnnnnnnnnnnnnnnnnnnnnnnnnnnnnnnnnnnnnnnnnnnnnnnnnnnnnnnnnnnnnnnnnnnnnnnnnnnnnnnnnnnnnnnnnnnnnnnnnnnnnnnnnnnnnnnnnnnnnnnnnnnnnnnnnnnnnnnnnnnnnnnnnnnnnnnnnnnnnnnnnnnnnnnnnnnnnnnnnnnnnnnnnnnnnnnnnnnnnnnnnnnnnnnnnnnnnnnnnnnnnnnnnnnnnnnnnnnnnnnnnnnnnnnnnnnnnnnnnnnnnnnnnnnnnnnnnnnnnnnnnnnnnnnnnnnnnnnnnnnnnnnnnnnnnnnnnnnnnnnnnnnnnnnnnnnnnnnnnnnnnnnnnnnnnnnnnnnnnnnnnnnnnnnnnnnnnnnnnnnnnnnnnnnnnnnnnnnnnnnnnnnnnnnnnnnnnnnnnnnnnnnnnnnnnnnnnnnnnnnnnnnnnnnnnnnnnnnnnnnnnnnnnnnnnnnnnnnnnnnnnnnnnnnnnnnnnnnnnnnnnnnnnnnnnnnnnnnnnnnnnnnnnnnnnnnnnnnnnnnnnnnnnnnnnnnnnnnnnnnnnnnnnnnnnnnnnnnnnnnnnnnnnnnnnnnnnnnnnnnnnnnnnnnnnnnnnnnnnnnnnnnnnnnnnnnnnnnnnnnnnnnnnnnnnnnnnnnnnnnnnnnnnnnnnnnnnnnnnnnnnnnnnnnnnnnnnnnnnnnnnnnnnnnnnnnnnnnnnnnnnnnnnnnnnnnnnnnnnnnnnnnnnnnnnnnnnnnnnnnnnnnnnnnnnnnnnnnnnnnnnnnnnnnnnnnnnnnnnnnnnnnnnnnnnnnnnnnnnnnnnnnnnnnnnnnnnnnnnnnnnnnnnnnnnnnnnnnnnnnnnnnnnnnnnnnnnnnnnnnnnnnnnnnnnnnnnnnnnnnnnnnnnnnnnnnnnnnnnnnnnnnnnnnnnnnnnnnnnnnnnnnnnnnnnnnnnnnnnnnnnnnnnnnnnnnnnnnnnnnnnnnnnnnnnnnnnnnnnnnnnnnnnnnnnnnnnnnnnnnnnnnnnnnnnnnnnnnnnnnnnnnnnnnnnnnnnnnnnnnnnnnnnnnnnnnnnnnnnnnnnnnnnnnnnnnnnnnnnnnnnnnnnnnnnnnnnnnnnnnnnnnnnnnnnnnnnnnnnnnnnnnnnnnnnnnnnnnnnnnnnnnnnnnnnnnnnnnnnnnnnnnnnnnnnnnnnnnnnnnnnnnnnnnnnnnnnnnnnnnnnnnnnnnnnnnnnnnnnnnnnnnnnnnnnnnnnnnnnnnnnnnnnnnnnnnnnnnnnnnnnnnnnnnnnnnnnnnnnnnnnnnnnnnnnnnnnnnnnnnnnnnnnnnnnnnnnnnnnnnnnnnnnnnnnnnnnnnnnnnnnnnnnnnnnnnnnnnnnnnnnnnnnnnnnnnnnnnnnnnnnnnnnnnnnnnnnnnnnnnnnnnnnnnnnnnnnnnnnnnnnnnnnnnnnnnnnnnnnnnnnnnnnnnnnnnnnnnnnnnnnnnnnnnnnnnnnnnnnnnnnnnnnnnnnnnnnnnnnnnnnnnnnnnnnnnnnnnnnnnnnnnnnnnnnnnnnnnnnnnnnnnnnnnnnnnnnnnnnnnnnnnnnnnnnnnnnnnnnnnnnnnnnnnnnnnnnnnnnnnnnnnnnnnnnnnnnnnnnnnnnnnnnnnnnnnnnnnnnnnnnnnnnnnnnnnnnnnnnnnnnnnnnnnnnnnnnnnnnnnnnnnnnnnnnnnnnnnnnnnnnnnnnnnnnnnnnnnnnnnnnnnnnnnnnnnnnnnnnnnnnnnnnnnnnnnnnnnnnnnnnnnnnnnnnnnnnnnnnnnnnnnnnnnnnnnnnnnnnnnnnnnnnnnnnnnnnnnnnnnnnnnnnnnnnnnnnnnnnnnnnnnnnnnnnnnnnnnnnnnnnnnnnnnnnnnnnnnnnnnnnnnnnnnnnnnnnnnnnnnnnnnnnnnnnnnnnnnnnnnnnnnnnnnnnnnnnnnnnnnnnnnnnnnnnnnnnnnnnnnnnnnnnnnnnnnnnnnnnnnnnnnnnnnnnnnnnnnnnnnnnnnnnnnnnnnnnnnnnnnnnnnnnnnnnnnnnnnnnnnnnnnnnnnnnnnnnnnnnnnnnnnnnnnnnnnnnnnnnnnnnnnnnnnnnnnnnnnnnnnnnnnnnnnnnnnnnnnnnnnnnnnnnnnnnnnnnnnnnnnnnnnnnnnnnnnnnnnnnnnnnnnnnnnnnnnnnnnnnnnnnnnnnnnnnnnnnnnnnnnnnnnnnnnnnnnnnnnnnnnnnnnnnnnnnnnnnnnnnnnnnnnnnnnnnnnnnnnnnnnnnnnnnnnnnnnnnnnnnnnnnnnnnnnnnnnnnnnnnnnnnnnnnnnnnnnnnnnnnnnnnnnnnnnnnnnnnnnnnnnnnnnnnnnnnnnnnnnnnnnnnnnnnnnnnnnnnnnnnnnnnnnnnnnnnnnnnnnnnnnnnnnnnnnnnnnnnnnnnnnnnnnnnnnnnnnnnnnnnnnnnnnnnnnnnnnnnnnnnnnnnnnnnnnnnnnnnnnnnnnnnnnnnnnnnnnnnnnnnnnnnnnnnnnnnnnnnnnnnnnnnnnnnnnnnnnnnnnnnnnnnnnnnnnnnnnnnnnnnnnnnnnnnnnnnnnnnnnnnnnnnnnnnnnnnnnnnnnnnnnnnnnnnnnnnnnnnnnnnnnnnnnnnnnnnnnnnnnnnnnnnnnnnnnnnnnnnnnnnnnnnnnnnnnnnnnnnnnnnnnnnnnnnnnnnnnnnnnnnnnnnnnnnnnnnnnnnnnnnnnnnnnnnnnnnnnnnnnnnnnnnnnnnnnnnnnnnnnnnnnnnnnnnnnnnnnnnnnnnnnnnnnnnnnnnnnnnnnnnnnnnnnnnnnnnnnnnnnnnnnnnnnnnnnnnnnnnnnnnnnnnnnnnnnnnnnnnnnnnnnnnnnnnnnnnnnnnnnnnnnnnnnnnnnnnnnnnnnnnnnnnnnnnnnnnnnnnnnnnnnnnnnnnnnnnnnnnnnnnnnnnnnnnnnnnnnnnnnnnnnnnnnnnnnnnnnnnnnnnnnnnnnnnnnnnnnnnnnnnnnnnnnnnnnnnnnnnnnnnnnnnnnnnnnnnnnnnnnnnnnnnnnnnnnnnnnnnnnnnnnnnnnnnnnnnnnnnnnnnnnnnnnnnnnnnnnnnnnnnnnnnnnnnnnnnnnnnnnnnnnnnnnnnnnnnnnnnnnnnnnnnnnnnnnnnnnnnnnnnnnnnnnnnnnnnnnnnnnnnnnnnnnnnnnnnnnnnnnnnnnnnnnnnnnnnnnnnnnnnnnnnnnnnnnnnnnnnnnnnnnnnnnnnnnnnnnnnnnnnnnnnnnnnnnnnnnnnnnnnnnnnnnnnnnnnnnnnnnnnnnnnnnnnnnnnnnnnnnnnnnnnnnnnnnnnnnnnnnnnnnnnnnnnnnnnnnnnnnnnnnnnnnnnnnnnnnnnnnnnnnnnnnnnnnnnnnnnnnnnnnnnnnnnnnnnnnnnnnnnnnnnnnnnnnnnnnnnnnnnnnnnnnnnnnnnnnnnnnnnnnnnnnnnnnnnnnnnnnnnnnnnnnnnnnnnnnnnnnnnnnnnnnnnnnnnnnnnnnnnnnnnnnnnnnnnnnnnnnnnnnnnnnnnnnnnnnnnnnnnnnnnnnnnnnnnnnnnnnnnnnnnnnnnnnnnnnnnnnnnnnnnnnnnnnnnnnnnnnnnnnnnnnnnnnnnnnnnnnnnnnnnnnnnnnnnnnnnnnnnnnnnnnnnnnnnnnnnnnnnnnnnnnnnnnnnnnnnnnnnnnnnnnnnnnnnnnnnnnnnnnnnnnnnnnnnnnnnnnnnnnnnnnnnnnnnnnnnnnnnnnnnnnnnnnnnnnnnnnnnnnnnnnnnnnnnnnnnnnnnnnnnnnnnnnnnnnnnnnnnnnnnnnnnnnnnnnnnnnnnnnnnnnnnnnnnnnnnnnnnnnnnnnnnnnnnnnnnnnnnnnnnnnnnnnnnnnnnnnnnnnnnnnnnnnnnnnnnnnnnnnnnnnnnnnnnnnnnnnnnnnnnnnnnnnnnnnnnnnnnnnnnnnnnnnnnnnnnnnnnnnnnnnnnnnnnnnnnnnnnnnnnnnnnnnnnnnnnnnnnnnnnnnnnnnnnnnnnnnnnnnnnnnnnnnnnnnnnnnnnnnnnnnnnnnnnnnnnnnnnnnnnnnnnnnnnnnnnnnnnnnnnnnnnnnnnnnnnnnnnnnnnnnnnnnnnnnnnnnnnnnnnnnnnnnnnnnnnnnnnnnnnnnnnnnnnnnnnnnnnnnnnnnnnnnnnnnnnnnnnnnnnnnnnnnnnnnnnnnnnnnnnnnnnnnnnnnnnnnnnnnnnnnnnnnnnnnnnnnnnnnnnnnnnnnnnnnnnnnnnnnnnnnnnnnnnnnnnnnnnnnnnnnnnnnnnnnnnnnnnnnnnnnnnnnnnnnnnnnnnnnnnnnnnnnnnnnnnnnnnnnnnnnnnnnnnnnnnnnnnnnnnnnnnnnnnnnnnnnnnnnnnnnnnnnnnnnnnnnnnnnnnnnnnnnnnnnnnnnnnnnnnnnnnnnnnnnnnnnnnnnnnnnnnnnnnnnnnnnnnnnnnnnnnnnnnnnnnnnnnnnnnnnnnnnnnnnnnnnnnnnnnnnnnnnnnnnnnnnnnnnnnnnnnnnnnnnnnnnnnnnnnnnnnnnnnnnnnnnnnnnnnnnnnnnnnnnnnnnnnnnnnnnnnnnnnnnnnnnnnnnnnnnnnnnnnnnnnnnnnnnnnnnnnnnnnnnnnnnnnnnnnnnnnnnnnnnnnnnnnnnnnnnnnnnnnnnnnnnnnnnnnnnnnnnnnnnnnnnnnnnnnnnnnnnnnnnnnnnnnnnnnnnnnnnnnnnnnnnnnnnnnnnnnnnnnnnnnnnnnnnnnnnnnnnnnnnnnnnnnnnnnnnnnnnnnnnnnnnnnnnnnnnnnnnnnnnnnnnnnnnnnnnnnnnnnnnnnnnnnnnnnnnnnnnnnnnnnnnnnnnnnnnnnnnnnnnnnnnnnnnnnnnnnnnnnnnnnnnnnnnnnnnnnnnnnnnnnnnnnnnnnnnnnnnnnnnnnnnnnnnnnnnnnnnnnnnnnnnnnnnnnnnnnnnnnnnnnnnnnnnnnnnnnnnnnnnnnnnnnnnnnnnnnnnnnnnnnnnnnnnnnnnnnnnnnnnnnnnnnnnnnnnnnnnnnnnnnnnnnnnnnnnnnnnnnnnnnnnnnnnnnnnnnnnnnnnnnnnnnnnnnnnnnnnnnnnnnnnnnnnnnnnnnnnnnnnnnnnnnnnnnnnnnnnnnnnnnnnnnnnnnnnnnnnnnnnnnnnnnnnnnnnnnnnnnnnnnnnnnnnnnnnnnnnnnnnnnnnnnnnnnnnnnnnnnnnnnnnnnnnnnnnnnnnnnnnnnnnnnnnnnnnnnnnnnnnnnnnnnnnnnnnnnnnnnnnnnnnnnnnnnnnnnnnnnnnnnnnnnnnnnnnnnnnnnnnnnnnnnnnnnnnnnnnnnnnnnnnnnnnnnnnnnnnnnnnnnnnnnnnnnnnnnnnnnnnnnnnnnnnnnnnnnnnnnnnnnnnnnnnnnnnnnnnnnnnnnnnnnnnnnnnnnnnnnnnnnnnnnnnnnnnnnnnnnnnnnnnnnnnnnnnnnnnnnnnnnnnnnnnnnnnnnnnnnnnnnnnnnnnnnnnnnnnnnnnnnnnnnnnnnnnnnnnnnnnnnnnnnnnnnnnnnnnnnnnnnnnnnnnnnnnnnnnnnnnnnnnnnnnnnnnnnnnnnnnnnnnnnnnnnnnnnnnnnnnnnnnnnnnnnnnnnnnnnnnnnnnnnnnnnnnnnnnnnnnnnnnnnnnnnnnnnnnnnnnnnnnnnnnnnnnnnnnnnnnnnnnnnnnnnnnnnnnnnnnnnnnnnnnnnnnnnnnnnnnnnnnnnnnnnnnnnnnnnnnnnnnnnnnnnnnnnnnnnnnnnnnnnnnnnnnnnnnnnnnnnnnnnnnnnnnnnnnnnnnnnnnnnnnnnnnnnnnnnnnnnnnnnnnnnnnnnnnnnnnnnnnnnnnnnnnnnnnnnnnnnnnnnnnnnnnnnnnnnnnnnnnnnnnnnnnnnnnnnnnnnnnnnnnnnnnnnnnnnnnnnnnnnnnnnnnnnnnnnnnnnnnnnnnnnnnnnnnnnnnnnnnnnnnnnnnnnnnnnnnnnnnnnnnnnnnnnnnnnnnnnnnnnnnnnnnnnnnnnnnnnnnnnnnnnnnnnnnnnnnnnnnnnnnnnnnnnnnnnnnnnnnnnnnnnnnnnnnnnnnnnnnnnnnnnnnnnnnnnnnnnnnnnnnnnnnnnnnnnnnnnnnnnnnnnnnnnnnnnnnnnnnnnnnnnnnnnnnnnnnnnnnnnnnnnnnnnnnnnnnnnnnnnnnnnnnnnnnnnnnnnnnnnnnnnnnnnnnnnnnnnnnnnnnnnnnnnnnnnnnnnnnnnnnnnnnnnnnnnnnnnnnnnnnnnnnnnnnnnnnnnnnnnnnnnnnnnnnnnnnnnnnnnnnnnnnnnnnnnnnnnnnnnnnnnnnnnnnnnnnnnnnnnnnnnnnnnnnnnnnnnnnnnnnnnnnnnnnnnnnnnnnnnnnnnnnnnnnnnnnnnnnnnnnnnnnnnnnnnnnnnnnnnnnnnnnnnnnnnnnnnnnnnnnnnnnnnnnnnnnnnnnnnnnnnnnnnnnnnnnnnnnnnnnnnnnnnnnnnnnnnnnnnnnnnnnnnnnnnnnnnnnnnnnnnnnnnnnnnnnnnnnnnnnnnnnnnnnnnnnnnnnnnnnnnnnnnnnnnnnnnnnnnnnnnnnnnnnnnnnnnnnnnnnnnnnnnnnnnnnnnnnnnnnnnnnnnnnnnnnnnnnnnnnnnnnnnnnnnnnnnnnnnnnnnnnnnnnnnnnnnnnnnnnnnnnnnnnnnnnnnnnnnnnnnnnnnnnnnnnnnnnnnnnnnnnnnnnnnnnnnnnnnnnnnnnnnnnnnnnnnnnnnnnnnnnnnnnnnnnnnnnnnnnnnnnnnnnnnnnnnnnnnnnnnnnnnnnnnnnnnnnnnnnnnnnnnnnnnnnnnnnnnnnnnnnnnnnnnnnnnnnnnnnnnnnnnnnnnnnnnnnnnnnnnnnnnnnnnnnnnnnnnnnnnnnnnnnnnnnnnnnnnnnnnnnnnnnnnnnnnnnnnnnnnnnnnnnnnnnnnnnnnnnnnnnnnnnnnnnnnnnnnnnnnnnnnnnnnnnnnnnnnnnnnnnnnnnnnnnnnnnnnnnnnnnnnnnnnnnnnnnnnnnnnnnnnnnnnnnnnnnnnnnnnnnnnnnnnnnnnnnnnnnnnnnnnnnnnnnnnnnnnnnnnnnnnnnnnnnnnnnnnnnnnnnnnnnnnnnnnnnnnnnnnnnnnnnnnnnnnnnnnnnnnnnnnnnnnnnnnnnnnnnnnnnnnnnnnnnnnnnnnnnnnnnnnnnnnnnnnnnnnnnnnnnnnnnnnnnnnnnnnnnnnnnnnnnnnnnnnnnnnnnnnnnnnnnnnnnnnnnnnnnnnnnnnnnnnnnnnnnnnnnnnnnnnnnnnnnnnnnnnnnnnnnnnnnnnnnnnnnnnnnnnnnnnnnnnnnnnnnnnnnnnnnnnnnnnnnnnnnnnnnnnnnnnnnnnnnnnnnnnnnnnnnnnnnnnnnnnnnnnnnnnnnnnnnnnnnnnnnnnnnnnnnnnnnnnnnnnnnnnnnnnnnnnnnnnnnnnnnnnnnnnnnnnnnnnnnnnnnnnnnnnnnnnnnnnnnnnnnnnnnnnnnnnnnnnnnnnnnnnnnnnnnnnnnnnnnnnnnnnnnnnnnnnnnnnnnnnnnnnnnnnnnnnnnnnnnnnnnnnnnnnnnnnnnnnnnnnnnnnnnnnnnnnnnnnnnnnnnnnnnnnnnnnnnnnnnnnnnnnnnnnnnnnnnnnnnnnnnnnnnnnnnnnnnnnnnnnnnnnnnnnnnnnnnnnnnnnnnnnnnnnnnnnnnnnnnnnnnnnnnnnnnnnnnnnnnnnnnnnnnnnnnnnnnnnnnnnnnnnnnnnnnnnnnnnnnnnnnnnnnnnnnnnnnnnnnnnnnnnnnnnnnnnnnnnnnnnnnnnnnnnnnnnnnnnnnnnnnnnnnnnnnnnnnnnnnnnnnnnnnnnnnnnnnnnnnnnnnnnnnnnnnnnnnnnnnnnnnnnnnnnnnnnnnnnnnnnnnnnnnnnnnnnnnnnnnnnnnnnnnnnnnnnnnnnnnnnnnnnnnnnnnnnnnnnnnnnnnnnnnnnnnnnnnnnnnnnnnnnnnnnnnnnnnnnnnnnnnnnnnnnnnnnnnnnnnnnnnnnnnnnnnnnnnnnnnnnnnnnnnnnnnnnnnnnnnnnnnnnnnnnnnnnnnnnnnnnnnnnnnnnnnnnnnnnnnnnnnnnnnnnnnnnnnnnnnnnnnnnnnnnnnnnnnnnnnnnnnnnnnnnnnnnnnnnnnnnnnnnnnnnnnnnnnnnnnnnnnnnnnnnnnnnnnnnnnnnnnnnnnnnnnnnnnnnnnnnnnnnnnnnnnnnnnnnnnnnnnnnnnnnnnnnnnnnnnnnnnnnnnnnnnnnnnnnnnnnnnnnnnnnnnnnnnnnnnnnnnnnnnnnnnnnnnnnnnnnnnnnnnnnnnnnnnnnnnnnnnnnnnnnnnnnnnnnnnnnnnnnnnnnnnnnnnnnnnnnnnnnnnnnnnnnnnnnnnnnnnnnnnnnnnnnnnnnnnnnnnnnnnnnnnnnnnnnnnnnnnnnnnnnnnnnnnnnnnnnnnnnnnnnnnnnnnnnnnnnnnnnnnnnnnnnnnnnnnnnnnnnnnnnnnnnnnnnnnnnnnnnnnnnnnnnnnnnnnnnnnnnnnnnnnnnnnnnnnnnnnnnnnnnnnnnnnnnnnnnnnnnnnnnnnnnnnnnnnnnnnnnnnnnnnnnnnnnnnnnnnnnnnnnnnnnnnnnnnnnnnnnnnnnnnnnnnnnnnnnnnnnnnnnnnnnnnnnnnnnnnnnnnnnnnnnnnnnnnnnnnnnnnnnnnnnnnnnnnnnnnnnnnnnnnnnnnnnnnnnnnnnnnnnnnnnnnnnnnnnnnnnnnnnnnnnnnnnnnnnnnnnnnnnnnnnnnnnnnnnnnnnnnnnnnnnnnnnnnnnnnnnnnnnnnnnnnnnnnnnnnnnnnnnnnnnnnnnnnnnnnnnnnnnnnnnnnnnnnnnnnnnnnnnnnnnnnnnnnnnnnnnnnnnnnnnnnnnnnnnnnnnnnnnnnnnnnnnnnnnnnnnnnnnnnnnnnnnnnnnnnnnnnnnnnnnnnnnnnnnnnnnnnnnnnnnnnnnnnnnnnnnnnnnnnnnnnnnnnnnnnnnnnnnnnnnnnnnnnnnnnnnnnnnnnnnnnnnnnnnnnnnnnnnnnnnnnnnnnnnnnnnnnnnnnnnnnnnnnnnnnnnnnnnnnnnnnnnnnnnnnnnnnnnnnnnnnnnnnnnnnnnnnnnnnnnnnnnnnnnnnnnnnnnnnnnnnnnnnnnnnnnnnnnnnnnnnnnnnnnnnnnnnnnnnnnnnnnnnnnnnnnnnnnnnnnnnnnnnnnnnnnnnnnnnnnnnnnnnnnnnnnnnnnnnnnnnnnnnnnnnnnnnnnnnnnnnnnnnnnnnnnnnnnnnnnnnnnnnnnnnnnnnnnnnnnnnnnnnnnnnnnnnnnnnnnnnnnnnnnnnnnnnnnnnnnnnnnnnnnnnnnnnnnnnnnnnnnnnnnnnnnnnnnnnnnnnnnnnnnnnnnnnnnnnnnnnnnnnnnnnnnnnnnnnnnnnnnnnnnnnnnnnnnnnnnnnnnnnnnnnnnnnnnnnnnnnnnnnnnnnnnnnnnnnnnnnnnnnnnnnnnnnnnnnnnnnnnnnnnnnnnnnnnnnnnnnnnnnnnnnnnnnnnnnnnnnnnnnnnnnnnnnnnnnnnnnnnnnnnnnnnnnnnnnnnnnnnnnnnnnnnnnnnnnnnnnnnnnnnnnnnnnnnnnnnnnnnnnnnnnnnnnnnnnnnnnnnnnnnnnnnnnnnnnnnnnnnnnnnnnnnnnnnnnnnnnnnnnnnnnnnnnnnnnnnnnnnnnnnnnnnnnnnnnnnnnnnnnnnnnnnnnnnnnnnnnnnnnnnnnnnnnnnnnnnnnnnnnnnnnnnnnnnnnnnnnnnnnnnnnnnnnnnnnnnnnnnnnnnnnnnnnnnnnnnnnnnnnnnnnnnnnnnnnnnnnnnnnnnnnnnnnnnnnnnnnnnnnnnnnnnnnnnnnnnnnnnnnnnnnnnnnnnnnnnnnnnnnnnnnnnnnnnnnnnnnnnnnnnnnnnnnnnnnnnnnnnnnnnnnnnnnnnnnnnnnnnnnnnnnnnnnnnnnnnnnnnnnnnnnnnnnnnnnnnnnnnnnnnnnnnnnnnnnnnnnnnnnnnnnnnnnnnnnnnnnnnnnnnnnnnnnnnnnnnnnnnnnnnnnnnnnnnnnnnnnnnnnnnnnnnnnnnnnnnnnnnnnnnnnnnnnnnnnnnnnnnnnnnnnnnnnnnnnnnnnnnnnnnnnnnnnnnnnnnnnnnnnnnnnnnnnnnnnnnnnnnnnnnnnnnnnnnnnnnnnnnnnnnnnnnnnnnnnnnnnnnnnnnnnnnnnnnnnnnnnnnnnnnnnnnnnnnnnnnnnnnnnnnnnnnnnnnnnnnnnnnnnnnnnnnnnnnnnnnnnnnnnnnnnnnnnnnnnnnnnnnnnnnnnnnnnnnnnnnnnnnnnnnnnnnnnnnnnnnnnnnnnnnnnnnnnnnnnnnnnnnnnnnnnnnnnnnnnnnnnnnnnnnnnnnnnnnnnnnnnnnnnnnnnnnnnnnnnnnnnnnnnnnnnnnnnnnnnnnnnnnnnnnnnnnnnnnnnnnnnnnnnnnnnnnnnnnnnnnnnnnnnnnnnnnnnnnnnnnnnnnnnnnnnnnnnnnnnnnnnnnnnnnnnnnnnnnnnnnnnnnnnnnnnnnnnnnnnnnnnnnnnnnnnnnnnnnnnnnnnnnnnnnnnnnnnnnnnnnnnnnnnnnnnnnnnnnnnnnnnnnnnnnnnnnnnnnnnnnnnnnnnnnnnnnnnnnnnnnnnnnnnnnnnnnnnnnnnnnnnnnnnnnnnnnnnnnnnnnnnnnnnnnnnnnnnnnnnnnnnnnnnnnnnnnnnnnnnnnnnnnnnnnnnnnnnnnnnnnnnnnnnnnnnnnnnnnnnnnnnnnnnnnnnnnnnnnnnnnnnnnnnnnnnnnnnnnnnnnnnnnnnnnnnnnnnnnnnnnnnnnnnnnnnnnnnnnnnnnnnnnnnnnnnnnnnnnnnnnnnnnnnnnnnnnnnnnnnnnnnnnnnnnnnnnnnnnnnnnnnnnnnnnnnnnnnnnnnnnnnnnnnnnnnnnnnnnnnnnnnnnnnnnnnnnnnnnnnnnnnnnnnnnnnnnnnnnnnnnnnnnnnnnnnnnnnnnnnnnnnnnnnnnnnnnnnnnnnnnnnnnnnnnnnnnnnnnnnnnnnnnnnnnnnnnnnnnnnnnnnnnnnnnnnnnnnnnnnnnnnnnnnnnnnnnnnnnnnnnnnnnnnnnnnnnnnnnnnnnnnnnnnnnnnnnnnnnnnnnnnnnnnnnnnnnnnnnnnnnnnnnnnnnnnnnnnnnnnnnnnnnnnnnnnnnnnnnnnnnnnnnnnnnnnnnnnnnnnnnnnnnnnnnnnnnnnnnnnnnnnnnnnnnnnnnnnnnnnnnnnnnnnnnnnnnnnnnnnnnnnnnnnnnnnnnnnnnnnnnnnnnnnnnnnnnnnnnnnnnnnnnnnnnnnnnnnnnnnnnnnnnnnnnnnnnnnnnnnnnnnnnnnnnnnnnnnnnnnnnnnnnnnnnnnnnnnnnnnnnnnnnnnnnnnnnnnnnnnnnnnnnnnnnnnnnnnnnnnnnnnnnnnnnnnnnnnnnnnnnnnnnnnnnnnnnnnnnnnnnnnnnnnnnnnnnnnnnnnnnnnnnnnnnnnnnnnnnnnnnnnnnnnnnnnnnnnnnnnnnnnnnnnnnnnnnnnnnnnnnnnnnnnnnnnnnnnnnnnnnnnnnnnnnnnnnnnnnnnnnnnnnnnnnnnnnnnnnnnnnnnnnnnnnnnnnnnnnnnnnnnnnnnnnnnnnnnnnnnnnnnnnnnnnnnnnnnnnnnnnnnnnnnnnnnnnnnnnnnnnnnnnnnnnnnnnnnnnnnnnnnnnnnnnnnnnnnnnnnnnnnnnnnnnnnnnnnnnnnnnnnnnnnnnnnnnnnnnnnnnnnnnnnnnnnnnnnnnnnnnnnnnnnnnnnnnnnnnnnnnnnnnnnnnnnnnnnnnnnnnnnnnnnnnnnnnnnnnnnnnnnnnnnnnnnnnnnnnnnnnnnnnnnnnnnnnnnnnnnnnnnnnnnnnnnnnnnnnnnnnnnnnnnnnnnnnnnnnnnnnnnnnnnnnnnnnnnnnnnnnnnnnnnnnnnnnnnnnnnnnnnnnnnnnnnnnnnnnnnnnnnnnnnnnnnnnnnnnnnnnnnnnnnnnnnnnnnnnnnnnnnnnnnnnnnnnnnnnnnnnnnnnnnnnnnnnnnnnnnnnnnnnnnnnnnnnnnnnnnnnnnnnnnnnnnnnnnnnnnnnnnnnnnnnnnnnnnnnnnnnnnnnnnnnnnnnnnnnnnnnnnnnnnnnnnnnnnnnnnnnnnnnnnnnnnnnnnnnnnnnnnnnnnnnnnnnnnnnnnnnnnnnnnnnnnnnnnnnnnnnnnnnnnnnnnnnnnnnnnnnnnnnnnnnnnnnnnnnnnnnnnnnnnnnnnnnnnnnnnnnnnnnnnnnnnnnnnnnnnnnnnnnnnnnnnnnnnnnnnnnnnnnnnnnnnnnnnnnnnnnnnnnnnnnnnnnnnnnnnnnnnnnnnnnnnnnnnnnnnnnnnnnnnnnnnnnnnnnnnnnnnnnnnnnnnnnnnnnnnnnnnnnnnnnnnnnnnnnnnnnnnnnnnnnnnnnnnnnnnnnnnnnnnnnnnnnnnnnnnnnnnnnnnnnnnnnnnnnnnnnnnnnnnnnnnnnnnnnnnnnnnnnnnnnnnnnnnnnnnnnnnnnnnnnnnnnnnnnnnnnnnnnnnnnnnnnnnnnnnnnnnnnnnnnnnnnnnnnnnnnnnnnnnnnnnnnnnnnnnnnnnnnnnnnnnnnnnnnnnnnnnnnnnnnnnnnnnnnnnnnnnnnnnnnnnnnnnnnnnnnnnnnnnnnnnnnnnnnnnnnnnnnnnnnnnnnnnnnnnnnnnnnnnnnnnnnnnnnnnnnnnnnnnnnnnnnnnnnnnnnnnnnnnnnnnnnnnnnnnnnnnnnnnnnnnnnnnnnnnnnnnnnnnnnnnnnnnnnnnnnnnnnnnnnnnnnnnnnnnnnnnnnnnnnnnnnnnnnnnnnnnnnnnnnnnnnnnnnnnnnnnnnnnnnnnnnnnnnnnnnnnnnnnnnnnnnnnnnnnnnnnnnnnnnnnnnnnnnnnnnnnnnnnnnnnnnnnnnnnnnnnnnnnnnnnnnnnnnnnnnnnnnnnnnnnnnnnnnnnnnnnnnnnnnnnnnnnnnnnnnnnnnnnnnnnnnnnnnnnnnnnnnnnnnnnnnnnnnnnnnnnnnnnnnnnnnnnnnnnnnnnnnnnnnnnnnnnnnnnnnnnnnnnnnnnnnnnnnnnnnnnnnnnnnnnnnnnnnnnnnnnnnnnnnnnnnnnnnnnnnnnnnnnnnnnnnnnnnnnnnnnnnnnnnnnnnnnnnnnnnnnnnnnnnnnnnnnnnnnnnnnnnnnnnnnnnnnnnnnnnnnnnnnnnnnnnnnnnnnnnnnnnnnnnnnnnnnnnnnnnnnnnnnnnnnnnnnnnnnnnnnnnnnnnnnnnnnnnnnnnnnnnnnnnnnnnnnnnnnnnnnnnnnnnnnnnnnnnnnnnnnnnnnnnnnnnnnnnnnnnnnnnnnnnnnnnnnnnnnnnnnnnnnnnnnnnnnnnnnnnnnnnnnnnnnnnnnnnnnnnnnnnnnnnnnnnnnnnnnnnnnnnnnnnnnnnnnnnnnnnnnnnnnnnnnnnnnnnnnnnnnnnnnnnnnnnnnnnnnnnnnnnnnnnnnnnnnnnnnnnnnnnnnnnnnnnnnnnnnnnnnnnnnnnnnnnnnnnnnnnnnnnnnnnnnnnnnnnnnnnnnnnnnnnnnnnnnnnnnnnnnnnnnnnnnnnnnnnnnnnnnnnnnnnnnnnnnnnnnnnnnnnnnnnnnnnnnnnnnnnnnnnnnnnnnnnnnnnnnnnnnnnnnnnnnnnnnnnnnnnnnnnnnnnnnnnnnnnnnnnnnnnnnnnnnnnnnnnnnnnnnnnnnnnnnnnnnnnnnnnnnnnnnnnnnnnnnnnnnnnnnnnnnnnnnnnnnnnnnnnnnnnnnnnnnnnnnnnnnnnnnnnnnnnnnnnnnnnnnnnnnnnnnnnnnnnnnnnnnnnnnnnnnnnnnnnnnnnnnnnnnnnnnnnnnnnnnnnnnnnnnnnnnnnnnnnnnnnnnnnnnnnnnnnnnnnnnnnnnnnnnnnnnnnnnnnnnnnnnnnnnnnnnnnnnnnnnnnnnnnnnnnnnnnnnnnnnnnnnnnnnnnnnnnnnnnnnnnnnnnnnnnnnnnnnnnnnnnnnnnnnnnnnnnnnnnnnnnnnnnnnnnnnnnnnnnnnnnnnnnnnnnnnnnnnnnnnnnnnnnnnnnnnnnnnnnnnnnnnnnnnnnnnnnnnnnnnnnnnnnnnnnnnnnnnnnnnnnnnnnnnnnnnnnnnnnnnnnnnnnnnnnnnnnnnnnnnnnnnnnnnnnnnnnnnnnnnnnnnnnnnnnnnnnnnnnnnnnnnnnnnnnnnnnnnnnnnnnnnnnnnnnnnnnnnnnnnnnnnnnnnnnnnnnnnnnnnnnnnnnnnnnnnnnnnnnnnnnnnnnnnnnnnnnnnnnnnnnnnnnnnnnnnnnnnnnnnnnnnnnnnnnnnnnnnnnnnnnnnnnnnnnnnnnnnnnnnnnnnnnnnnnnnnnnnnnnnnnnnnnnnnnnnnnnnnnnnnnnnnnnnnnnnnnnnnnnnnnnnnnnnnnnnnnnnnnnnnnnnnnnnnnnnnnnnnnnnnnnnnnnnnnnnnnnnnnnnnnnnnnnnnnnnnnnnnnnnnnnnnnnnnnnnnnnnnnnnnnnnnnnnnnnnnnnnnnnnnnnnnnnnnnnnnnnnnnnnnnnnnnnnnnnnnnnnnnnnnnnnnnnnnnnnnnnnnnnnnnnnnnnnnnnnnnnnnnnnnnnnnnnnnnnnnnnnnnnnnnnnnnnnnnnnnnnnnnnnnnnnnnnnnnnnnnnnnnnnnnnnnnnnnnnnnnnnnnnnnnnnnnnnnnnnnnnnnnnnnnnnnnnnnnnnnnnnnnnnnnnnnnnnnnnnnnnnnnnnnnnnnnnnnnnnnnnnnnnnnnnnnnnnnnnnnnnnnnnnnnnnnnnnnnnnnnnnnnnnnnnnnnnnnnnnnnnnnnnnnnnnnnnnnnnnnnnnnnnnnnnnnnnnnnnnnnnnnnnnnnnnnnnnnnnnnnnnnnnnnnnnnnnnnnnnnnnnnnnnnnnnnnnnnnnnnnnnnnnnnnnnnnnnnnnnnnnnnnnnnnnnnnnnnnnnnnnnnnnnnnnnnnnnnnnnnnnnnnnnnnnnnnnnnnnnnnnnnnnnnnnnnnnnnnnnnnnnnnnnnnnnnnnnnnnnnnnnnnnnnnnnnnnnnnnnnnnnnnnnnnnnnnnnnnnnnnnnnnnnnnnnnnnnnnnnnnnnnnnnnnnnnnnnnnnnnnnnnnnnnnnnnnnnnnnnnnnnnnnnnnnnnnnnnnnnnnnnnnnnnnnnnnnnnnnnnnnnnnnnnnnnnnnnnnnnnnnnnnnnnnnnnnnnnnnnnnnnnnnnnnnnnnnnnnnnnnnnnnnnnnnnnnnnnnnnnnnnnnnnnnnnnnnnnnnnnnnnnnnnnnnnnnnnnnnnnnnnnnnnnnnnnnnnnnnnnnnnnnnnnnnnnnnnnnnnnnnnnnnnnnnnnnnnnnnnnnnnnnnnnnnnnnnnnnnnnnnnnnnnnnnnnnnnnnnnnnnnnnnnnnnnnnnnnnnnnnnnnnnnnnnnnnnnnnnnnnnnnnnnnnnnnnnnnnnnnnnnnnnnnnnnnnnnnnnnnnnnnnnnnnnnnnnnnnnnnnnnnnnnnnnnnnnnnnnnnnnnnnnnnnnnnnnnnnnnnnnnnnnnnnnnnnnnnnnnnnnnnnnnnnnnnnnnnnnnnnnnnnnnnnnnnnnnnnnnnnnnnnnnnnnnnnnnnnnnnnnnnnnnnnnnnnnnnnnnnnnnnnnnnnnnnnnnnnnnnnnnnnnnnnnnnnnnnnnnnnnnnnnnnnnnnnnnnnnnnnnnnnnnnnnnnnnnnnnnnnnnnnnnnnnnnnnnnnnnnnnnnnnnnnnnnnnnnnnnnnnnnnnnnnnnnnnnnnnnnnnnnnnnnnnnnnnnnnnnnnnnnnnnnnnnnnnnnnnnnnnnnnnnnnnnnnnnnnnnnnnnnnnnnnnnnnnnnnnnnnnnnnnnnnnnnnnnnnnnnnnnnnnnnnnnnnnnnnnnnnnnnnnnnnnnnnnnnnnnnnnnnnnnnnnnnnnnnnnnnnnnnnnnnnnnnnnnnnnnnnnnnnnnnnnnnnnnnnnnnnnnnnnnnnnnnnnnnnnnnnnnnnnnnnnnnnnnnnnnnnnnnnnnnnnnnnnnnnnnnnnnnnnnnnnnnnnnnnnnnnnnnnnnnnnnnnnnnnnnnnnnnnnnnnnnnnnnnnnnnnnnnnnnnnnnnnnnnnnnnnnnnnnnnnnnnnnnnnnnnnnnnnnnnnnnnnnnnnnnnnnnnnnnnnnnnnnnnnnnnnnnnnnnnnnnnnnnnnnnnnnnnnnnnnnnnnnnnnnnnnnnnnnnnnnnnnnnnnnnnnnnnnnnnnnnnnnnnnnnnnnnnnnnnnnnnnnnnnnnnnnnnnnnnnnnnnnnnnnnnnnnnnnnnnnnnnnnnnnnnnnnnnnnnnnnnnnnnnnnnnnnnnnnnnnnnnnnnnnnnnnnnnnnnnnnnnnnnnnnnnnnnnnnnnnnnnnnnnnnnnnnnnnnnnnnnnnnnnnnnnnnnnnnnnnnnnnnnnnnnnnnnnnnnnnnnnnnnnnnnnnnnnnnnnnnnnnnnnnnnnnnnnnnnnnnnnnnnnnnnnnnnnnnnnnnnnnnnnnnnnnnnnnnnnnnnnnnnnnnnnnnnnnnnnnnnnnnnnnnnnnnnnnnnnnnnnnnnnnnnnnnnnnnnnnnnnnnnnnnnnnnnnnnnnnnnnnnnnnnnnnnnnnnnnnnnnnnnnnnnnnnnnnnnnnnnnnnnnnnnnnnnnnnnnnnnnnnnnnnnnnnnnnnnnnnnnnnnnnnnnnnnnnnnnnnnnnnnnnnnnnnnnnnnnnnnnnnnnnnnnnnnnnnnnnnnnnnnnnnnnnnnnnnnnnnnnnnnnnnnnnnnnnnnnnnnnnnnnnnnnnnnnnnnnnnnnnnnnnnnnnnnnnnnnnnnnnnnnnnnnnnnnnnnnnnnnnnnnnnnnnnnnnnnnnnnnnnnnnnnnnnnnnnnnnnnnnnnnnnnnnnnnnnnnnnnnnnnnnnnnnnnnnnnnnnnnnnnnnnnnnnnnnnnnnnnnnnnnnnnnnnnnnnnnnnnnnnnnnnnnnnnnnnnnnnnnnnnnnnnnnnnnnnnnnnnnnnnnnnnnnnnnnnnnnnnnnnnnnnnnnnnnnnnnnnnnnnnnnnnnnnnnnnnnnnnnnnnnnnnnnnnnnnnnnnnnnnnnnnnnnnnnnnnnnnnnnnnnnnnnnnnnnnnnnnnnnnnnnnnnnnnnnnnnnnnnnnnnnnnnnnnnnnnnnnnnnnnnnnnnnnnnnnnnnnnnnnnnnnnnnnnnnnnnnnnnnnnnnnnnnnnnnnnnnnnnnnnnnnnnnnnnnnnnnnnnnnnnnnnnnnnnnnnnnnnnnnnnnnnnnnnnnnnnnnnnnnnnnnnnnnnnnnnnnnnnnnnnnnnnnnnnnnnnnnnnnnnnnnnnnnnnnnnnnnnnnnnnnnnnnnnnnnnnnnnnnnnnnnnnnnnnnnnnnnnnnnnnnnnnnnnnnnnnnnnnnnnnnnnnnnnnnnnnnnnnnnnnnnnnnnnnnnnnnnnnnnnnnnnnnnnnnnnnnnnnnnnnnnnnnnnnnnnnnnnnnnnnnnnnnnnnnnnnnnnnnnnnnnnnnnnnnnnnnnnnnnnnnnnnnnnnnnnnnnnnnnnnnnnnnnnnnnnnnnnnnnnnnnnnnnnnnnnnnnnnnnnnnnnnnnnnnnnnnnnnnnnnnnnnnnnnnnnnnnnnnnnnnnnnnnnnnnnnnnnnnnnnnnnnnnnnnnnnnnnnnnnnnnnnnnnnnnnnnnnnnnnnnnnnnnnnnnnnnnnnnnnnnnnnnnnnnnnnnnnnnnnnnnnnnnnnnnnnnnnnnnnnnnnnnnnnnnnnnnnnnnnnnnnnnnnnnnnnnnnnnnnnnnnnnnnnnnnnnnnnnnnnnnnnnnnnnnnnnnnnnnnnnnnnnnnnnnnnnnnnnnnnnnnnnnnnnnnnnnnnnnnnnnnnnnnnnnnnnnnnnnnnnnnnnnnnnnnnnnnnnnnnnnnnnnnnnnnnnnnnnnnnnnnnnnnnnnnnnnnnnnnnnnnnnnnnnnnnnnnnnnnnnnnnnnnnnnnnnnnnnnnnnnnnnnnnnnnnnnnnnnnnnnnnnnnnnnnnnnnnnnnnnnnnnnnnnnnnnnnnnnnnnnnnnnnnnnnnnnnnnnnnnnnnnnnnnnnnnnnnnnnnnnnnnnnnnnnnnnnnnnnnnnnnnnnnnnnnnnnnnnnnnnnnnnnnnnnnnnnnnnnnnnnnnnnnnnnnnnnnnnnnnnnnnnnnnnnnnnnnnnnnnnnnnnnnnnnnnnnnnnnnnnnnnnnnnnnnnnnnnnnnnnnnnnnnnnnnnnnnnnnnnnnnnnnnnnnnnnnnnnnnnnnnnnnnnnnnnnnnnnnnnnnnnnnnnnnnnnnnnnnnnnnnnnnnnnnnnnnnnnnnnnnnnnnnnnnnnnnnnnnnnnnnnnnnnnnnnnnnnnnnnnnnnnnnnnnnnnnnnnnnnnnnnnnnnnnnnnnnnnnnnnnnnnnnnnnnnnnnnnnnnnnnnnnnnnnnnnnnnnnnnnnnnnnnnnnnnnnnnnnnnnnnnnnnnnnnnnnnnnnnnnnnnnnnnnnnnnnnnnnnnnnnnnnnnnnnnnnnnnnnnnnnnnnnnnnnnnnnnnnnnnnnnnnnnnnnnnnnnnnnnnnnnnnnnnnnnnnnnnnnnnnnnnnnnnnnnnnnnnnnnnnnnnnnnnnnnnnnnnnnnnnnnnnnnnnnnnnnnnnnnnnnnnnnnnnnnnnnnnnnnnnnnnnnnnnnnnnnnnnnnnnnnnnnnnnnnnnnnnnnnnnnnnnnnnnnnnnnnnnnnnnnnnnnnnnnnnnnnnnnnnnnnnnnnnnnnnnnnnnnnnnnnnnnnnnnnnnnnnnnnnnnnnnnnnnnnnnnnnnnnnnnnnnnnnnnnnnnnnnnnnnnnnnnnnnnnnnnnnnnnnnnnnnnnnnnnnnnnnnnnnnnnnnnnnnnnnnnnnnnnnnnnnnnnnnnnnnnnnnnnnnnnnnnnnnnnnnnnnnnnnnnnnnnnnnnnnnnnnnnnnnnnnnnnnnnnnnnnnnnnnnnnnnnnnnnnnnnnnnnnnnnnnnnnnnnnnnnnnnnnnnnnnnnnnnnnnnnnnnnnnnnnnnnnnnnnnnnnnnnnnnnnnnnnnnnnnnnnnnnnnnnnnnnnnnnnnnnnnnnnnnnnnnnnnnnnnnnnnnnnnnnnnnnnnnnnnnnnnnnnnnnnnnnnnnnnnnnnnnnnnnnnnnnnnnnnnnnnnnnnnnnnnnnnnnnnnnnnnnnnnnnnnnnnnnnnnnnnnnnnnnnnnnnnnnnnnnnnnnnnnnnnnnnnnnnnnnnnnnnnnnnnnnnnnnnnnnnnnnnnnnnnnnnnnnnnnnnnnnnnnnnnnnnnnnnnnnnnnnnnnnnnnnnnnnnnnnnnnnnnnnnnnnnnnnnnnnnnnnnnnnnnnnnnnnnnnnnnnnnnnnnnnnnnnnnnnnnnnnnnnnnnnnnnnnnnnnnnnnnnnnnnnnnnnnnnnnnnnnnnnnnnnnnnnnnnnnnnnnnnnnnnnnnnnnnnnnnnnnnnnnnnnnnnnnnnnnnnnnnnnnnnnnnnnnnnnnnnnnnnnnnnnnnnnnnnnnnnnnnnnnnnnnnnnnnnnnnnnnnnnnnnnnnnnnnnnnnnnnnnnnnnnnnnnnnnnnnnnnnnnnnnnnnnnnnnnnnnnnnnnnnnnnnnnnnnnnnnnnnnnnnnnnnnnnnnnnnnnnnnnnnnnnnnnnnnnnnnnnnnnnnnnnnnnnnnnnnnnnnnnnnnnnnnnnnnnnnnnnnnnnnnnnnnnnnnnnnnnnnnnnnnnnnnnnnnnnnnnnnnnnnnnnnnnnnnnnnnnnnnnnnnnnnnnnnnnnnnnnnnnnnnnnnnnnnnnnnnnnnnnnnnnnnnnnnnnnnnnnnnnnnnnnnnnnnnnnnnnnnnnnnnnnnnnnnnnnnnnnnnnnnnnnnnnnnnnnnnnnnnnnnnnnnnnnnnnnnnnnnnnnnnnnnnnnnnnnnnnnnnnnnnnnnnnnnnnnnnnnnnnnnnnnnnnnnnnnnnnnnnnnnnnnnnnnnnnnnnnnnnnnnnnnnnnnnnnnnnnnnnnnnnnnnnnnnnnnnnnnnnnnnnnnnnnnnnnnnnnnnnnnnnnnnnnnnnnnnnnnnnnnnnnnnnnnnnnnnnnnnnnnnnnnnnnnnnnnnnnnnnnnnnnnnnnnnnnnnnnnnnnnnnnnnnnnnnnnnnnnnnnnnnnnnnnnnnnnnnnnnnnnnnnnnnnnnnnnnnnnnnnnnnnnnnnnnnnnnnnnnnnnnnnnnnnnnnnnnnnnnnnnnnnnnnnnnnnnnnnnnnnnnnnnnnnnnnnnnnnnnnnnnnnnnnnnnnnnnnnnnnnnnnnnnnnnnnnnnnnnnnnnnnnnnnnnnnnnnnnnnnnnnnnnnnnnnnnnnnnnnnnnnnnnnnnnnnnnnnnnnnnnnnnnnnnnnnnnnnnnnnnnnnnnnnnnnnnnnnnnnnnnnnnnnnnnnnnnnnnnnnnnnnnnnnnnnnnnnnnnnnnnnnnnnnnnnnnnnnnnnnnnnnnnnnnnnnnnnnnnnnnnnnnnnnnnnnnnnnnnnnnnnnnnnnnnnnnnnnnnnnnnnnnnnnnnnnnnnnnnnnnnnnnnnnnnnnnnnnnnnnnnnnnnnnnnnnnnnnnnnnnnnnnnnnnnnnnnnnnnnnnnnnnnnnnnnnnnnnnnnnnnnnnnnnnnnnnnnnnnnnnnnnnnnnnnnnnnnnnnnnnnnnnnnnnnnnnnnnnnnnnnnnnnnnnnnnnnnnnnnnnnnnnnnnnnnnnnnnnnnnnnnnnnnnnnnnnnnnnnnnnnnnnnnnnnnnnnnnnnnnnnnnnnnnnnnnnnnnnnnnnnnnnnnnnnnnnnnnnnnnnnnnnnnnnnnnnnnnnnnnnnnnnnnnnnnnnnnnnnnnnnnnnnnnnnnnnnnnnnnnnnnnnnnnnnnnnnnnnnnnnnnnnnnnnnnnnnnnnnnnnnnnnnnnnnnnnnnnnnnnnnnnnnnnnnnnnnnnnnnnnnnnnnnnnnnnnnnnnnnnnnnnnnnnnnnnnnnnnnnnnnnnnnnnnnnnnnnnnnnnnnnnnnnnnnnnnnnnnnnnnnnnnnnnnnnnnnnnnnnnnnnnnnnnnnnnnnnnnnnnnnnnnnnnnnnnnnnnnnnnnnnnnnnnnnnnnnnnnnnnnnnnnnnnnnnnnnnnnnnnnnnnnnnnnnnnnnnnnnnnnnnnnnnnnnnnnnnnnnnnnnnnnnnnnnnnnnnnnnnnnnnnnnnnnnnnnnnnnnnnnnnnnnnnnnnnnnnnnnnnnnnnnnnnnnnnnnnnnnnnnnnnnnnnnnnnnnnnnnnnnnnnnnnnnnnnnnnnnnnnnnnnnnnnnnnnnnnnnnnnnnnnnnnnnnnnnnnnnnnnnnnnnnnnnnnnnnnnnnnnnnnnnnnnnnnnnnnnnnnnnnnnnnnnnnnnnnnnnnnnnnnnnnnnnnnnnnnnnnnnnnnnnnnnnnnnnnnnnnnnnnnnnnnnnnnnnnnnnnnnnnnnnnnnnnnnnnnnnnnnnnnnnnnnnnnnnnnnnnnnnnnnnnnnnnnnnnnnnnnnnnnnnnnnnnnnnnnnnnnnnnnnnnnnnnnnnnnnnnnnnnnnnnnnnnnnnnnnnnnnnnnnnnnnnnnnnnnnnnnnnnnnnnnnnnnnnnnnnnnnnnnnnnnnnnnnnnnnnnnnnnnnnnnnnnnnnnnnnnnnnnnnnnnnnnnnnnnnnnnnnnnnnnnnnnnnnnnnnnnnnnnnnnnnnnnnnnnnnnnnnnnnnnnnnnnnnnnnnnnnnnnnnnnnnnnnnnnnnnnnnnnnnnnnnnnnnnnnnnnnnnnnnnnnnnnnnnnnnnnnnnnnnnnnnnnnnnnnnnnnnnnnnnnnnnnnnnnnnnnnnnnnnnnnnnnnnnnnnnnnnnnnnnnnnnnnnnnnnnnnnnnnnnnnnnnnnnnnnnnnnnnnnnnnnnnnnnnnnnnnnnnnnnnnnnnnnnnnnnnnnnnnnnnnnnnnnnnnnnnnnnnnnnnnnnnnnnnnnnnnnnnnnnnnnnnnnnnnnnnnnnnnnnnnnnnnnnnnnnnnnnnnnnnnnnnnnnnnnnnnnnnnnnnnnnnnnnnnnnnnnnnnnnnnnnnnnnnnnnnnnnnnnnnnnnnnnnnnnnnnnnnnnnnnnnnnnnnnnnnnnnnnnnnnnnnnnnnnnnnnnnnnnnnnnnnnnnnnnnnnnnnnnnnnnnnnnnnnnnnnnnnnnnnnnnnnnnnnnnnnnnnnnnnnnnnnnnnnnnnnnnnnnnnnnnnnnnnnnnnnnnnnnnnnnnnnnnnnnnnnnnnnnnnnnnnnnnnnnnnnnnnnnnnnnnnnnnnnnnnnnnnnnnnnnnnnnnnnnnnnnnnnnnnnnnnnnnnnnnnnnnnnnnnnnnnnnnnnnnnnnnnnnnnnnnnnnnnnnnnnnnnnnnnnnnnnnnnnnnnnnnnnnnnnnnnnnnnnnnnnnnnnnnnnnnnnnnnnnnnnnnnnnnnnnnnnnnnnnnnnnnnnnnnnnnnnnnnnnnnnnnnnnnnnnnnnnnnnnnnnnnnnnnnnnnnnnnnnnnnnnnnnnnnnnnnnnnnnnnnnnnnnnnnnnnnnnnnnnnnnnnnnnnnnnnnnnnnnnnnnnnnnnnnnnnnnnnnnnnnnnnnnnnnnnnnnnnnnnnnnnnnnnnnnnnnnnnnnnnnnnnnnnnnnnnnnnnnnnnnnnnnnnnnnnnnnnnnnnnnnnnnnnnnnnnnnnnnnnnnnnnnnnnnnnnnnnnnnnnnnnnnnnnnnnnnnnnnnnnnnnnnnnnnnnnnnnnnnnnnnnnnnnnnnnnnnnnnnnnnnnnnnnnnnnnnnnnnnnnnnnnnnnnnnnnnnnnnnnnnnnnnnnnnnnnnnnnnnnnnnnnnnnnnnnnnnnnnnnnnnnnnnnnnnnnnnnnnnnnnnnnnnnnnnnnnnnnnnnnnnnnnnnnnnnnnnnnnnnnnnnnnnnnnnnnnnnnnnnnnnnnnnnnnnnnnnnnnnnnnnnnnnnnnnnnnnnnnnnnnnnnnnnnnnnnnnnnnnnnnnnnnnnnnnnnnnnnnnnnnnnnnnnnnnnnnnnnnnnnnnnnnnnnnnnnnnnnnnnnnnnnnnnnnnnnnnnnnnnnnnnnnnnnnnnnnnnnnnnnnnnnnnnnnnnnnnnnnnnnnnnnnnnnnnnnnnnnnnnnnnnnnnnnnnnnnnnnnnnnnnnnnnnnnnnnnnnnnnnnnnnnnnnnnnnnnnnnnnnnnnnnnnnnnnnnnnnnnnnnnnnnnnnnnnnnnnnnnnnnnnnnnnnnnnnnnnnnnnnnnnnnnnnnnnnnnnnnnnnnnnnnnnnnnnnnnnnnnnnnnnnnnnnnnnnnnnnnnnnnnnnnnnnnnnnnnnnnnnnnnnnnnnnnnnnnnnnnnnnnnnnnnnnnnnnnnnnnnnnnnnnnnnnnnnnnnnnnnnnnnnnnnnnnnnnnnnnnnnnnnnnnnnnnnnnnnnnnnnnnnnnnnnnnnnnnnnnnnnnnnnnnnnnnnnnnnnnnnnnnnnnnnnnnnnnnnnnnnnnnnnnnnnnnnnnnnnnnnnnnnnnnnnnnnnnnnnnnnnnnnnnnnnnnnnnnnnnnnnnnnnnnnnnnnnnnnnnnnnnnnnnnnnnnnnnnnnnnnnnnnnnnnnnnnnnnnnnnnnnnnnnnnnnnnnnnnnnnnnnnnnnnnnnnnnnnnnnnnnnnnnnnnnnnnnnnnnnnnnnnnnnnnnnnnnnnnnnnnnnnnnnnnnnnnnnnnnnnnnnnnnnnnnnnnnnnnnnnnnnnnnnnnnnnnnnnnnnnnnnnnnnnnnnnnnnnnnnnnnnnnnnnnnnnnnnnnnnnnnnnnnnnnnnnnnnnnnnnnnnnnnnnnnnnnnnnnnnnnnnnnnnnnnnnnnnnnnnnnnnnnnnnnnnnnnnnnnnnnnnnnnnnnnnnnnnnnnnnnnnnnnnnnnnnnnnnnnnnnnnnnnnnnnnnnnnnnnnnnnnnnnnnnnnnnnnnnnnnnnnnnnnnnnnnnnnnnnnnnnnnnnnnnnnnnnnnnnnnnnnnnnnnnnnnnnnnnnnnnnnnnnnnnnnnnnnnnnnnnnnnnnnnnnnnnnnnnnnnnnnnnnnnnnnnnnnnnnnnnnnnnnnnnnnnnnnnnnnnnnnnnnnnnnnnnnnnnnnnnnnnnnnnnnnnnnnnnnnnnnnnnnnnnnnnnnnnnnnnnnnnnnnnnnnnnnnnnnnnnnnnnnnnnnnnnnnnnnnnnnnnnnnnnnnnnnnnnnnnnnnnnnnnnnnnnnnnnnnnnnnnnnnnnnnnnnnnnnnnnnnnnnnnnnnnnnnnnnnnnnnnnnnnnnnnnnnnnnnnnnnnnnnnnnnnnnnnnnnnnnnnnnnnnnnnnnnnnnnnnnnnnnnnnnnnnnnnnnnnnnnnnnnnnnnnnnnnnnnnnnnnnnnnnnnnnnnnnnnnnnnnnnnnnnnnnnnnnnnnnnnnnnnnnnnnnnnnnnnnnnnnnnnnnnnnnnnnnnnnnnnnnnnnnnnnnnnnnnnnnnnnnnnnnnnnnnnnnnnnnnnnnnnnnnnnnnnnnnnnnnnnnnnnnnnnnnnnnnnnnnnnnnnnnnnnnnnnnnnnnnnnnnnnnnnnnnnnnnnnnnnnnnnnnnnnnnnnnnnnnnnnnnnnnnnnnnnnnnnnnnnnnnnnnnnnnnnnnnnnnnnnnnnnnnnnnnnnnnnnnnnnnnnnnnnnnnnnnnnnnnnnnnnnnnnnnnnnnnnnnnnnnnnnnnnnnnnnnnnnnnnnnnnnnnnnnnnnnnnnnnnnnnnnnnnnnnnnnnnnnnnnnnnnnnnnnnnnnnnnnnnnnnnnnnnnnnnnnnnnnnnnnnnnnnnnnnnnnnnnnnnnnnnnnnnnnnnnnnnnnnnnnnnnnnnnnnnnnnnnnnnnnnnnnnnnnnnnnnnnnnnnnnnnnnnnnnnnnnnnnnnnnnnnnnnnnnnnnnnnnnnnnnnnnnnnnnnnnnnnnnnnnnnnnnnnnnnnnnnnnnnnnnnnnnnnnnnnnnnnnnnnnnnnnnnnnnnnnnnnnnnnnnnnnnnnnnnnnnnnnnnnnnnnnnnnnnnnnnnnnnnnnnnnnnnnnnnnnnnnnnnnnnnnnnnnnnnnnnnnnnnnnnnnnnnnnnnnnnnnnnnnnnnnnnnnnnnnnnnnnnnnnnnnnnnnnnnnnnnnnnnnnnnnnnnnnnnnnnnnnnnnnnnnnnnnnnnnnnnnnnnnnnnnnnnnnnnnnnnnnnnnnnnnnnnnnnnnnnnnnnnnnnnnnnnnnnnnnnnnnnnnnnnnnnnnnnnnnnnnnnnnnnnnnnnnnnnnnnnnnnnnnnnnnnnnnnnnnnnnnnnnnnnnnnnnnnnnnnnnnnnnnnnnnnnnnnnnnnnnnnnnnnnnnnnnnnnnnnnnnnnnnnnnnnnnnnnnnnnnnnnnnnnnnnnnnnnnnnnnnnnnnnnnnnnnnnnnnnnnnnnnnnnnnnnnnnnnnnnnnnnnnnnnnnnnnnnnnnnnnnnnnnnnnnnnnnnnnnnnnnnnnnnnnnnnnnnnnnnnnnnnnnnnnnnnnnnnnnnnnnnnnnnnnnnnnnnnnnnnnnnnnnnnnnnnnnnnnnnnnnnnnnnnnnnnnnnnnnnnnnnnnnnnnnnnnnnnnnnnnnnnnnnnnnnnnnnnnnnnnnnnnnnnnnnnnnnnnnnnnnnnnnnnnnnnnnnnnnnnnnnnnnnnnnnnnnnnnnnnnnnnnnnnnnnnnnnnnnnnnnnnnnnnnnnnnnnnnnnnnnnnnnnnnnnnnnnnnnnnnnnnnnnnnnnnnnnnnnnnnnnnnnnnnnnnnnnnnnnnnnnnnnnnnnnnnnnnnnnnnnnnnnnnnnnnnnnnnnnnnnnnnnnnnnnnnnnnnnnnnnnnnnnnnnnnnnnnnnnnnnnnnnnnnnnnnnnnnnnnnnnnnnnnnnnnnnnnnnnnnnnnnnnnnnnnnnnnnnnnnnnnnnnnnnnnnnnnnnnnnnnnnnnnnnnnnnnnnnnnnnnnnnnnnnnnnnnnnnnnnnnnnnnnnnnnnnnnnnnnnnnnnnnnnnnnnnnnnnnnnnnnnnnnnnnnnnnnnnnnnnnnnnnnnnnnnnnnnnnnnnnnnnnnnnnnnnnnnnnnnnnnnnnnnnnnnnnnnnnnnnnnnnnnnnnnnnnnnnnnnnnnnnnnnnnnnnnnnnnnnnnnnnnnnnnnnnnnnnnnnnnnnnnnnnnnnnnnnnnnnnnnnnnnnnnnnnnnnnnnnnnnnnnnnnnnnnnnnnnnnnnnnnnnnnnnnnnnnnnnnnnnnnnnnnnnnnnnnnnnnnnnnnnnnnnnnnnnnnnnnnnnnnnnnnnnnnnnnnnnnnnnnnnnnnnnnnnnnnnnnnnnnnnnnnnnnnnnnnnnnnnnnnnnnnnnnnnnnnnnnnnnnnnnnnnnnnnnnnnnnnnnnnnnnnnnnnnnnnnnnnnnnnnnnnnnnnnnnnnnnnnnnnnnnnnnnnnnnnnnnnnnnnnnnnnnnnnnnnnnnnnnnnnnnnnnnnnnnnnnnnnnnnnnnnnnnnnnnnnnnnnnnnnnnnnnnnnnnnnnnnnnnnnnnnnnnnnnnnnnnnnnnnnnnnnnnnnnnnnnnnnnnnnnnnnnnnnnnnnnnnnnnnnnnnnnnnnnnnnnnnnnnnnnnnnnnnnnnnnnnnnnnnnnnnnnnnnnnnnnnnnnnnnnnnnnnnnnnnnnnnnnnnnnnnnnnnnnnnnnnnnnnnnnnnnnnnnnnnnnnnnnnnnnnnnnnnnnnnnnnnnnnnnnnnnnnnnnnnnnnnnnnnnnnnnnnnnnnnnnnnnnnnnnnnnnnnnnnnnnnnnnnnnnnnnnnnnnnnnnnnnnnnnnnnnnnnnnnnnnnnnnnnnnnnnnnnnnnnnnnnnnnnnnnnnnnnnnnnnnnnnnnnnnnnnnnnnnnnnnnnnnnnnnnnnnnnnnnnnnnnnnnnnnnnnnnnnnnnnnnnnnnnnnnnnnnnnnnnnnnnnnnnnnnnnnnnnnnnnnnnnnnnnnnnnnnnnnnnnnnnnnnnnnnnnnnnnnnnnnnnnnnnnnnnnnnnnnnnnnnnnnnnnnnnnnnnnnnnnnnnnnnnnnnnnnnnnnnnnnnnnnnnnnnnnnnnnnnnnnnnnnnnnnnnnnnnnnnnnnnnnnnnnnnnnnnnnnnnnnnnnnnnnnnnnnnnnnnnnnnnnnnnnnnnnnnnnnnnnnnnnnnnnnnnnnnnnnnnnnnnnnnnnnnnnnnnnnnnnnnnnnnnnnnnnnnnnnnnnnnnnnnnnnnnnnnnnnnnnnnnnnnnnnnnnnnnnnnnnnnnnnnnnnnnnnnnnnnnnnnnnnnnnnnnnnnnnnnnnnnnnnnnnnnnnnnnnnnnnnnnnnnnnnnnnnnnnnnnnnnnnnnnnnnnnnnnnnnnnnnnnnnnnnnnnnnnnnnnnnnnnnnnnnnnnnnnnnnnnnnnnnnnnnnnnnnnnnnnnnnnnnnnnnnnnnnnnnnnnnnnnnnnnnnnnnnnnnnnnnnnnnnnnnnnnnnnnnnnnnnnnnnnnnnnnnnnnnnnnnnnnnnnnnnnnnnnnnnnnnnnnnnnnnnnnnnnnnnnnnnnnnnnnnnnnnnnnnnnnnnnnnnnnnnnnnnnnnnnnnnnnnnnnnnnnnnnnnnnnnnnnnnnnnnnnnnnnnnnnnnnnnnnnnnnnnnnnnnnnnnnnnnnnnnnnnnnnnnnnnnnnnnnnnnnnnnnnnnnnnnnnnnnnnnnnnnnnnnnnnnnnnnnnnnnnnnnnnnnnnnnnnnnnnnnnnnnnnnnnnnnnnnnnnnnnnnnnnnnnnnnnnnnnnnnnnnnnnnnnnnnnnnnnnnnnnnnnnnnnnnnnnnnnnnnnnnnnnnnnnnnnnnnnnnnnnnnnnnnnnnnnnnnnnnnnnnnnnnnnnnnnnnnnnnnnnnnnnnnnnnnnnnnnnnnnnnnnnnnnnnnnnnnnnnnnnnnnnnnnnnnnnnnnnnnnnnnnnnnnnnnnnnnnnnnnnnnnnnnnnnnnnnnnnnnnnnnnnnnnnnnnnnnnnnnnnnnnnnnnnnnnnnnnnnnnnnnnnnnnnnnnnnnnnnnnnnnnnnnnnnnnnnnnnnnnnnnnnnnnnnnnnnnnnnnnnnnnnnnnnnnnnnnnnnnnnnnnnnnnnnnnnnnnnnnnnnnnnnnnnnnnnnnnnnnnnnnnnnnnnnnnnnnnnnnnnnnnnnnnnnnnnnnnnnnnnnnnnnnnnnnnnnnnnnnnnnnnnnnnnnnnnnnnnnnnnnnnnnnnnnnnnnnnnnnnnnnnnnnnnnnnnnnnnnnnnnnnnnnnnnnnnnnnnnnnnnnnnnnnnnnnnnnnnnnnnnnnnnnnnnnnnnnnnnnnnnnnnnnnnnnnnnnnnnnnnnnnnnnnnnnnnnnnnnnnnnnnnnnnnnnnnnnnnnnnnnnnnnnnnnnnnnnnnnnnnnnnnnnnnnnnnnnnnnnnnnnnnnnnnnnnnnnnnnnnnnnnnnnnnnnnnnnnnnnnnnnnnnnnnnnnnnnnnnnnnnnnnnnnnnnnnnnnnnnnnnnnnnnnnnnnnnnnnnnnnnnnnnnnnnnnnnnnnnnnnnnnnnnnnnnnnnnnnnnnnnnnnnnnnnnnnnnnnnnnnnnnnnnnnnnnnnnnnnnnnnnnnnnnnnnnnnnnnnnnnnnnnnnnnnnnnnnnnnnnnnnnnnnnnnnnnnnnnnnnnnnnnnnnnnnnnnnnnnnnnnnnnnnnnnnnnnnnnnnnnnnnnnnnnnnnnnnnnnnnnnnnnnnnnnnnnnnnnnnnnnnnnnnnnnnnnnnnnnnnnnnnnnnnnnnnnnnnnnnnnnnnnnnnnnnnnnnnnnnnnnnnnnnnnnnnnnnnnnnnnnnnnnnnnnnnnnnnnnnnnnnnnnnnnnnnnnnnnnnnnnnnnnnnnnnnnnnnnnnnnnnnnnnnnnnnnnnnnnnnnnnnnnnnnnnnnnnnnnnnnnnnnnnnnnnnnnnnnnnnnnnnnnnnnnnnnnnnnnnnnnnnnnnnnnnnnnnnnnnnnnnnnnnnnnnnnnnnnnnnnnnnnnnnnnnnnnnnnnnnnnnnnnnnnnnnnnnnnnnnnnnnnnnnnnnnnnnnnnnnnnnnnnnnnnnnnnnnnnnnnnnnnnnnnnnnnnnnnnnnnnnnnnnnnnnnnnnnnnnnnnnnnnnnnnnnnnnnnnnnnnnnnnnnnnnnnnnnnnnnnnnnnnnnnnnnnnnnnnnnnnnnnnnnnnnnnnnnnnnnnnnnnnnnnnnnnnnnnnnnnnnnnnnnnnnnnnnnnnnnnnnnnnnnnnnnnnnnnnnnnnnnnnnnnnnnnnnnnnnnnnnnnnnnnnnnnnnnnnnnnnnnnnnnnnnnnnnnnnnnnnnnnnnnnnnnnnnnnnnnnnnnnnnnnnnnnnnnnnnnnnnnnnnnnnnnnnnnnnnnnnnnnnnnnnnnnnnnnnnnnnnnnnnnnnnnnnnnnnnnnnnnnnnnnnnnnnnnnnnnnnnnnnnnnnnnnnnnnnnnnnnnnnnnnnnnnnnnnnnnnnnnnnnnnnnnnnnnnnnnnnnnnnnnnnnnnnnnnnnnnnnnnnnnnnnnnnnnnnnnnnnnnnnnnnnnnnnnnnnnnnnnnnnnnnnnnnnnnnnnnnnnnnnnnnnnnnnnnnnnnnnnnnnnnnnnnnnnnnnnnnnnnnnnnnnnnnnnnnnnnnnnnnnnnnnnnnnnnnnnnnnnnnnnnnnnnnnnnnnnnnnnnnnnnnnnnnnnnnnnnnnnnnnnnnnnnnnnnnnnnnnnnnnnnnnnnnnnnnnnnnnnnnnnnnnnnnnnnnnnnnnnnnnnnnnnnnnnnnnnnnnnnnnnnnnnnnnnnnnnnnnnnnnnnnnnnnnnnnnnnnnnnnnnnnnnnnnnnnnnnnnnnnnnnnnnnnnnnnnnnnnnnnnnnnnnnnnnnnnnnnnnnnnnnnnnnnnnnnnnnnnnnnnnnnnnnnnnnnnnnnnnnnnnnnnnnnnnnnnnnnnnnnnnnnnnnnnnnnnnnnnnnnnnnnnnnnnnnnnnnnnnnnnnnnnnnnnnnnnnnnnnnnnnnnnnnnnnnnnnnnnnnnnnnnnnnnnnnnnnnnnnnnnnnnnnnnnnnnnnnnnnnnnnnnnnnnnnnnnnnnnnnnnnnnnnnnnnnnnnnnnnnnnnnnnnnnnnnnnnnnnnnnnnnnnnnnnnnnnnnnnnnnnnnnnnnnnnnnnnnnnnnnnnnnnnnnnnnnnnnnnnnnnnnnnnnnnnnnnnnnnnnnnnnnnnnnnnnnnnnnnnnnnnnnnnnnnnnnnnnnnnnnnnnnnnnnnnnnnnnnnnnnnnnnnnnnnnnnnnnnnnnnnnnnnnnnnnnnnnnnnnnnnnnnnnnnnnnnnnnnnnnnnnnnnnnnnnnnnnnnnnnnnnnnnnnnnnnnnnnnnnnnnnnnnnnnnnnnnnnnnnnnnnnnnnnnnnnnnnnnnnnnnnnnnnnnnnnnnnnnnnnnnnnnnnnnnnnnnnnnnnnnnnnnnnnnnnnnnnnnnnnnnnnnnnnnnnnnnnnnnnnnnnnnnnnnnnnnnnnnnnnnnnnnnnnnnnnnnnnnnnnnnnnnnnnnnnnnnnnnnnnnnnnnnnnnnnnnnnnnnnnnnnnnnnnnnnnnnnnnnnnnnnnnnnnnnnnnnnnnnnnnnnnnnnnnnnnnnnnnnnnnnnnnnnnnnnnnnnnnnnnnnnnnnnnnnnnnnnnnnnnnnnnnnnnnnnnnnnnnnnnnnnnnnnnnnnnnnnnnnnnnnnnnnnnnnnnnnnnnnnnnnnnnnnnnnnnnnnnnnnnnnnnnnnnnnnnnnnnnnnnnnnnnnnnnnnnnnnnnnnnnnnnnnnnnnnnnnnnnnnnnnnnnnnnnnnnnnnnnnnnnnnnnnnnnnnnnnnnnnnnnnnnnnnnnnnnnnnnnnnnnnnnnnnnnnnnnnnnnnnnnnnnnnnnnnnnnnnnnnnnnnnnnnnnnnnnnnnnnnnnnnnnnnnnnnnnnnnnnnnnnnnnnnnnnnnnnnnnnnnnnnnnnnnnnnnnnnnnnnnnnnnnnnnnnnnnnnnnnnnnnnnnnnnnnnnnnnnnnnnnnnnnnnnnnnnnnnnnnnnnnnnnnnnnnnnnnnnnnnnnnnnnnnnnnnnnnnnnnnnnnnnnnnnnnnnnnnnnnnnnnnnnnnnnnnnnnnnnnnnnnnnnnnnnnnnnnnnnnnnnnnnnnnnnnnnnnnnnnnnnnnnnnnnnnnnnnnnnnnnnnnnnnnnnnnnnnnnnnnnnnnnnnnnnnnnnnnnnnnnnnnnnnnnnnnnnnnnnnnnnnnnnnnnnnnnnnnnnnnnnnnnnnnnnnnnnnnnnnnnnnnnnnnnnnnnnnnnnnnnnnnnnnnnnnnnnnnnnnnnnnnnnnnnnnnnnnnnnnnnnnnnnnnnnnnnnnnnnnnnnnnnnnnnnnnnnnnnnnnnnnnnnnnnnnnnnnnnnnnnnnnnnnnnnnnnnnnnnnnnnnnnnnnnnnnnnnnnnnnnnnnnnnnnnnnnnnnnnnnnnnnnnnnnnnnnnnnnnnnnnnnnnnnnnnnnnnnnnnnnnnnnnnnnnnnnnnnnnnnnnnnnnnnnnnnnnnnnnnnnnnnnnnnnnnnnnnnnnnnnnnnnnnnnnnnnnnnnnnnnnnnnnnnnnnnnnnnnnnnnnnnnnnnnnnnnnnnnnnnnnnnnnnnnnnnnnnnnnnnnnnnnnnnnnnnnnnnnnnnnnnnnnnnnnnnnnnnnnnnnnnnnnnnnnnnnnnnnnnnnnnnnnnnnnnnnnnnnnnnnnnnnnnnnnnnnnnnnnnnnnnnnnnnnnnnnnnnnnnnnnnnnnnnnnnnnnnnnnnnnnnnnnnnnnnnnnnnnnnnnnnnnnnnnnnnnnnnnnnnnnnnnnnnnnnnnnnnnnnnnnnnnnnnnnnnnnnnnnnnnnnnnnnnnnnnnnnnnnnnnnnnnnnnnnnnnnnnnnnnnnnnnnnnnnnnnnnnnnnnnnnnnnnnnnnnnnnnnnnnnnnnnnnnnnnnnnnnnnnnnnnnnnnnnnnnnnnnnnnnnnnnnnnnnnnnnnnnnnnnnnnnnnnnnnnnnnnnnnnnnnnnnnnnnnnnnnnnnnnnnnnnnnnnnnnnnnnnnnnnnnnnnnnnnnnnnnnnnnnnnnnnnnnnnnnnnnnnnnnnnnnnnnnnnnnnnnnnnnnnnnnnnnnnnnnnnnnnnnnnnnnnnnnnnnnnnnnnnnnnnnnnnnnnnnnnnnnnnnnnnnnnnnnnnnnnnnnnnnnnnnnnnnnnnnnnnnnnnnnnnnnnnnnnnnnnnnnnnnnnnnnnnnnnnnnnnnnnnnnnnnnnnnnnnnnnnnnnnnnnnnnnnnnnnnnnnnnnnnnnnnnnnnnnnnnnnnnnnnnnnnnnnnnnnnnnnnnnnnnnnnnnnnnnnnnnnnnnnnnnnnnnnnnnnnnnnnnnnnnnnnnnnnnnnnnnnnnnnnnnnnnnnnnnnnnnnnnnnnnnnnnnnnnnnnnnnnnnnnnnnnnnnnnnnnnnnnnnnnnnnnnnnnnnnnnnnnnnnnnnnnnnnnnnnnnnnnnnnnnnnnnnnnnnnnnnnnnnnnnnnnnnnnnnnnnnnnnnnnnnnnnnnnnnnnnnnnnnnnnnnnnnnnnnnnnnnnnnnnnnnnnnnnnnnnnnnnnnnnnnnnnnnnnnnnnnnnnnnnnnnnnnnnnnnnnnnnnnnnnnnnnnnnnnnnnnnnnnnnnnnnnnnnnnnnnnnnnnnnnnnnnnnnnnnnnnnnnnnnnnnnnnnnnnnnnnnnnnnnnnnnnnnnnnnnnnnnnnnnnnnnnnnnnnnnnnnnnnnnnnnnnnnnnnnnnnnnnnnnnnnnnnnnnnnnnnnnnnnnnnnnnnnnnnnnnnnnnnnnnnnnnnnnnnnnnnnnnnnnnnnnnnnnnnnnnnnnnnnnnnnnnnnnnnnnnnnnnnnnnnnnnnnnnnnnnnnnnnnnnnnnnnnnnnnnnnnnnnnnnnnnnnnnnnnnnnnnnnnnnnnnnnnnnnnnnnnnnnnnnnnnnnnnnnnnnnnnnnnnnnnnnnnnnnnnnnnnnnnnnnnnnnnnnnnnnnnnnnnnnnnnnnnnnnnnnnnnnnnnnnnnnnnnnnnnnnnnnnnnnnnnnnnnnnnnnnnnnnnnnnnnnnnnnnnnnnnnnnnnnnnnnnnnnnnnnnnnnnnnnnnnnnnnnnnnnnnnnnnnnnnnnnnnnnnnnnnnnnnnnnnnnnnnnnnnnnnnnnnnnnnnnnnnnnnnnnnnnnnnnnnnnnnnnnnnnnnnnnnnnnnnnnnnnnnnnnnnnnnnnnnnnnnnnnnnnnnnnnnnnnnnnnnnnnnnnnnnnnnnnnnnnnnnnnnnnnnnnnnnnnnnnnnnnnnnnnnnnnnnnnnnnnnnnnnnnnnnnnnnnnnnnnnnnnnnnnnnnnnnnnnnnnnnnnnnnnnnnnnnnnnnnnnnnnnnnnnnnnnnnnnnnnnnnnnnnnnnnnnnnnnnnnnnnnnnnnnnnnnnnnnnnnnnnnnnnnnnnnnnnnnnnnnnnnnnnnnnnnnnnnnnnnnnnnnnnnnnnnnnnnnnnnnnnnnnnnnnnnnnnnnnnnnnnnnnnnnnnnnnnnnnnnnnnnnnnnnnnnnnnnnnnnnnnnnnnnnnnnnnnnnnnnnnnnnnnnnnnnnnnnnnnnnnnnnnnnnnnnnnnnnnnnnnnnnnnnnnnnnnnnnnnnnnnnnnnnnnnnnnnnnnnnnnnnnnnnnnnnnnnnnnnnnnnnnnnnnnnnnnnnnnnnnnnnnnnnnnnnnnnnnnnnnnnnnnnnnnnnnnnnnnnnnnnnnnnnnnnnnnnnnnnnnnnnnnnnnnnnnnnnnnnnnnnnnnnnnnnnnnnnnnnnnnnnnnnnnnnnnnnnnnnnnnnnnnnnnnnnnnnnnnnnnnnnnnnnnnnnnnnnnnnnnnnnnnnnnnnnnnnnnnnnnnnnnnnnnnnnnnnnnnnnnnnnnnnnnnnnnnnnnnnnnnnnnnnnnnnnnnnnnnnnnnnnnnnnnnnnnnnnnnnnnnnnnnnnnnnnnnnnnnnnnnnnnnnnnnnnnnnnnnnnnnnnnnnnnnnnnnnnnnnnnnnnnnnnnnnnnnnnnnnnnnnnnnnnnnnnnnnnnnnnnnnnnnnnnnnnnnnnnnnnnnnnnnnnnnnnnnnnnnnnnnnnnnnnnnnnnnnnnnnnnnnnnnnnnnnnnnnnnnnnnnnnnnnnnnnnnnnnnnnnnnnnnnnnnnnnnnnnnnnnnnnnnnnnnnnnnnnnnnnnnnnnnnnnnnnnnnnnnnnnnnnnnnnnnnnnnnnnnnnnnnnnnnnnnnnnnnnnnnnnnnnnnnnnnnnnnnnnnnnnnnnnnnnnnnnnnnnnnnnnnnnnnnnnnnnnnnnnnnnnnnnnnnnnnnnnnnnnnnnnnnnnnnnnnnnnnnnnnnnnnnnnnnnnnnnnnnnnnnnnnnnnnnnnnnnnnnnnnnnnnnnnnnnnnnnnnnnnnnnnnnnnnnnnnnnnnnnnnnnnnnnnnnnnnnnnnnnnnnnnnnnnnnnnnnnnnnnnnnnnnnnnnnnnnnnnnnnnnnnnnnnnnnnnnnnnnnnnnnnnnnnnnnnnnnnnnnnnnnnnnnnnnnnnnnnnnnnnnnnnnnnnnnnnnnnnnnnnnnnnnnnnnnnnnnnnnnnnnnnnnnnnnnnnnnnnnnnnnnnnnnnnnnnnnnnnnnnnnnnnnnnnnnnnnnnnnnnnnnnnnnnnnnnnnnnnnnnnnnnnnnnnnnnnnnnnnnnnnnnnnnnnnnnnnnnnnnnnnnnnnnnnnnnnnnnnnnnnnnnnnnnnnnnnnnnnnnnnnnnnnnnnnnnnnnnnnnnnnnnnnnnnnnnnnnnnnnnnnnnnnnnnnnnnnnnnnnnnnnnnnnnnnnnnnnnnnnnnnnnnnnnnnnnnnnnnnnnnnnnnnnnnnnnnnnnnnnnnnnnnnnnnnnnnnnnnnnnnnnnnnnnnnnnnnnnnnnnnnnnnnnnnnnnnnnnnnnnnnnnnnnnnnnnnnnnnnnnnnnnnnnnnnnnnnnnnnnnnnnnnnnnnnnnnnnnnnnnnnnnnnnnnnnnnnnnnnnnnnnnnnnnnnnnnnnnnnnnnnnnnnnnnnnnnnnnnnnnnnnnnnnnnnnnnnnnnnnnnnnnnnnnnnnnnnnnnnnnnnnnnnnnnnnnnnnnnnnnnnnnnnnnnnnnnnnnnnnnnnnnnnnnnnnnnnnnnnnnnnnnnnnnnnnnnnnnnnnnnnnnnnnnnnnnnnnnnnnnnnnnnnnnnnnnnnnnnnnnnnnnnnnnnnnnnnnnnnnnnnnnnnnnnnnnnnnnnnnnnnnnnnnnnnnnnnnnnnnnnnnnnnnnnnnnnnnnnnnnnnnnnnnnnnnnnnnnnnnnnnnnnnnnnnnnnnnnnnnnnnnnnnnnnnnnnnnnnnnnnnnnnnnnnnnnnnnnnnnnnnnnnnnnnnnnnnnnnnnnnnnnnnnnnnnnnnnnnnnnnnnnnnnnnnnnnnnnnnnnnnnnnnnnnnnnnnnnnnnnnnnnnnnnnnnnnnnnnnnnnnnnnnnnnnnnnnnnnnnnnnnnnnnnnnnnnnnnnnnnnnnnnnnnnnnnnnnnnnnnnnnnnnnnnnnnnnnnnnnnnnnnnnnnnnnnnnnnnnnnnnnnnnnnnnnnnnnnnnnnnnnnnnnnnnnnnnnnnnnnnnnnnnnnnnnnnnnnnnnnnnnnnnnnnnnnnnnnnnnnnnnnnnnnnnnnnnnnnnnnnnnnnnnnnnnnnnnnnnnnnnnnnnnnnnnnnnnnnnnnnnnnnnnnnnnnnnnnnnnnnnnnnnnnnnnnnnnnnnnnnnnnnnnnnnnnnnnnnnnnnnnnnnnnnnnnnnnnnnnnnnnnnnnnnnnnnnnnnnnnnnnnnnnnnnnnnnnnnnnnnnnnnnnnnnnnnnnnnnnnnnnnnnnnnnnnnnnnnnnnnnnnnnnnnnnnnnnnnnnnnnnnnnnnnnnnnnnnnnnnnnnnnnnnnnnnnnnnnnnnnnnnnnnnnnnnnnnnnnnnnnnnnnnnnnnnnnnnnnnnnnnnnnnnnnnnnnnnnnnnnnnnnnnnnnnnnnnnnnnnnnnnnnnnnnnnnnnnnnnnnnnnnnnnnnnnnnnnnnnnnnnnnnnnnnnnnnnnnnnnnnnnnnnnnnnnnnnnnnnnnnnnnnnnnnnnnnnnnnnnnnnnnnnnnnnnnnnnnnnnnnnnnnnnnnnnnnnnnnnnnnnnnnnnnnnnnnnnnnnnnnnnnnnnnnnnnnnnnnnnnnnnnnnnnnnnnnnnnnnnnnnnnnnnnnnnnnnnnnnnnnnnnnnnnnnnnnnnnnnnnnnnnnnnnnnnnnnnnnnnnnnnnnnnnnnnnnnnnnnnnnnnnnnnnnnnnnnnnnnnnnnnnnnnnnnnnnnnnnnnnnnnnnnnnnnnnnnnnnnnnnnnnnnnnnnnnnnnnnnnnnnnnnnnnnnnnnnnnnnnnnnnnnnnnnnnnnnnnnnnnnnnnnnnnnnnnnnnnnnnnnnnnnnnnnnnnnnnnnnnnnnnnnnnnnnnnnnnnnnnnnnnnnnnnnnnnnnnnnnnnnnnnnnnnnnnnnnnnnnnnnnnnnnnnnnnnnnnnnnnnnnnnnnnnnnnnnnnnnnnnnnnnnnnnnnnnnnnnnnnnnnnnnnnnnnnnnnnnnnnnnnnnnnnnnnnnnnnnnnnnnnnnnnnnnnnnnnnnnnnnnnnnnnnnnnnnnnnnnnnnnnnnnnnnnnnnnnnnnnnnnnnnnnnnnnnnnnnnnnnnnnnnnnnnnnnnnnnnnnnnnnnnnnnnnnnnnnnnnnnnnnnnnnnnnnnnnnnnnnnnnnnnnnnnnnnnnnnnnnnnnnnnnnnnnnnnnnnnnnnnnnnnnnnnnnnnnnnnnnnnnnnnnnnnnnnnnnnnnnnnnnnnnnnnnnnnnnnnnnnnnnnnnnnnnnnnnnnnnnnnnnnnnnnnnnnnnnnnnnnnnnnnnnnnnnnnnnnnnnnnnnnnnnnnnnnnnnnnnnnnnnnnnnnnnnnnnnnnnnnnnnnnnnnnnnnnnnnnnnnnnnnnnnnnnnnnnnnnnnnnnnnnnnnnnnnnnnnnnnnnnnnnnnnnnnnnnnnnnnnnnnnnnnnnnnnnnnnnnnnnnnnnnnnnnnnnnnnnnnnnnnnnnnnnnnnnnnnnnnnnnnnnnnnnnnnnnnnnnnnnnnnnnnnnnnnnnnnnnnnnnnnnnnnnnnnnnnnnnnnnnnnnnnnnnnnnnnnnnnnnnnnnnnnnnnnnnnnnnnnnnnnnnnnnnnnnnnnnnnnnnnnnnnnnnnnnnnnnnnnnnnnnnnnnnnnnnnnnnnnnnnnnnnnnnnnnnnnnnnnnnnnnnnnnnnnnnnnnnnnnnnnnnnnnnnnnnnnnnnnnnnnnnnnnnnnnnnnnnnnnnnnnnnnnnnnnnnnnnnnnnnnnnnnnnnnnnnnnnnnnnnnnnnnnnnnnnnnnnnnnnnnnnnnnnnnnnnnnnnnnnnnnnnnnnnnnnnnnnnnnnnnnnnnnnnnnnnnnnnnnnnnnnnnnnnnnnnnnnnnnnnnnnnnnnnnnnnnnnnnnnnnnnnnnnnnnnnnnnnnnnnnnnnnnnnnnnnnnnnnnnnnnnnnnnnnnnnnnnnnnnnnnnnnnnnnnnnnnnnnnnnnnnnnnnnnnnnnnnnnnnnnnnnnnnnnnnnnnnnnnnnnnnnnnnnnnnnnnnnnnnnnnnnnnnnnnnnnnnnnnnnnnnnnnnnnnnnnnnnnnnnnnnnnnnnnnnnnnnnnnnnnnnnnnnnnnnnnnnnnnnnnnnnnnnnnnnnnnnnnnnnnnnnnnnnnnnnnnnnnnnnnnnnnnnnnnnnnnnnnnnnnnnnnnnnnnnnnnnnnnnnnnnnnnnnnnnnnnnnnnnnnnnnnnnnnnnnnnnnnnnnnnnnnnnnnnnnnnnnnnnnnnnnnnnnnnnnnnnnnnnnnnnnnnnnnnnnnnnnnnnnnnnnnnnnnnnnnnnnnnnnnnnnnnnnnnnnnnnnnnnnnnnnnnnnnnnnnnnnnnnnnnnnnnnnnnnnnnnnnnnnnnnnnnnnnnnnnnnnnnnnnnnnnnnnnnnnnnnnnnnnnnnnnnnnnnnnnnnnnnnnnnnnnnnnnnnnnnnnnnnnnnnnnnnnnnnnnnnnnnnnnnnnnnnnnnnnnnnnnnnnnnnnnnnnnnnnnnnnnnnnnnnnnnnnnnnnnnnnnnnnnnnnnnnnnnnnnnnnnnnnnnnnnnnnnnnnnnnnnnnnnnnnnnnnnnnnnnnnnnnnnnnnnnnnnnnnnnnnnnnnnnnnnnnnnnnnnnnnnnnnnnnnnnnnnnnnnnnnnnnnnnnnnnnnnnnnnnnnnnnnnnnnnnnnnnnnnnnnnnnnnnnnnnnnnnnnnnnnnnnnnnnnnnnnnnnnnnnnnnnnnnnnnnnnnnnnnnnnnnnnnnnnnnnnnnnnnnnnnnnnnnnnnnnnnnnnnnnnnnnnnnnnnnnnnnnnnnnnnnnnnnnnnnnnnnnnnnnnnnnnnnnnnnnnnnnnnnnnnnnnnnnnnnnnnnnnnnnnnnnnnnnnnnnnnnnnnnnnnnnnnnnnnnnnnnnnnnnnnnnnnnnnnnnnnnnnnnnnnnnnnnnnnnnnnnnnnnnnnnnnnnnnnnnnnnnnnnnnnnnnnnnnnnnnnnnnnnnnnnnnnnnnnnnnnnnnnnnnnnnnnnnnnnnnnnnnnnnnnnnnnnnnnnnnnnnnnnnnnnnnnnnnnnnnnnnnnnnnnnnnnnnnnnnnnnnnnnnnnnnnnnnnnnnnnnnnnnnnnnnnnnnnnnnnnnnnnnnnnnnnnnnnnnnnnnnnnnnnnnnnnnnnnnnnnnnnnnnnnnnnnnnnnnnnnnnnnnnnnnnnnnnnnnnnnnnnnnnnnnnnnnnnnnnnnnnnnnnnnnnnnnnnnnnnnnnnnnnnnnnnnnnnnnnnnnnnnnnnnnnnnnnnnnnnnnnnnnnnnnnnnnnnnnnnnnnnnnnnnnnnnnnnnnnnnnnnnnnnnnnnnnnnnnnnnnnnnnnnnnnnnnnnnnnnnnnnnnnnnnnnnnnnnnnnnnnnnnnnnnnnnnnnnnnnnnnnnnnnnnnnnnnnnnnnnnnnnnnnnnnnnnnnnnnnnnnnnnnnnnnnnnnnnnnnnnnnnnnnnnnnnnnnnnnnnnnnnnnnnnnnnnnnnnnnnnnnnnnnnnnnnnnnnnnnnnnnnnnnnnnnnnnnnnnnnnnnnnnnnnnnnnnnnnnnnnnnnnnnnnnnnnnnnnnnnnnnnnnnnnnnnnnnnnnnnnnnnnnnnnnnnnnnnnnnnnnnnnnnnnnnnnnnnnnnnnnnnnnnnnnnnnnnnnnnnnnnnnnnnnnnnnnnnnnnnnnnnnnnnnnnnnnnnnnnnnnnnnnnnnnnnnnnnnnnnnnnnnnnnnnnnnnnnnnnnnnnnnnnnnnnnnnnnnnnnnnnnnnnnnnnnnnnnnnnnnnnnnnnnnnnnnnnnnnnnnnnnnnnnnnnnnnnnnnnnnnnnnnnnnnnnnnnnnnnnnnnnnnnnnnnnnnnnnnnnnnnnnnnnnnnnnnnnnnnnnnnnnnnnnnnnnnnnnnnnnnnnnnnnnnnnnnnnnnnnnnnnnnnnnnnnnnnnnnnnnnnnnnnnnnnnnnnnnnnnnnnnnnnnnnnnnnnnnnnnnnnnnnnnnnnnnnnnnnnnnnnnnnnnnnnnnnnnnnnnnnnnnnnnnnnnnnnnnnnnnnnnnnnnnnnnnnnnnnnnnnnnnnnnnnnnnnnnnnnnnnnnnnnnnnnnnnnnnnnnnnnnnnnnnnnnnnnnnnnnnnnnnnnnnnnnnnnnnnnnnnnnnnnnnnnnnnnnnnnnnnnnnnnnnnnnnnnnnnnnnnnnnnnnnnnnnnnnnnnnnnnnnnnnnnnnnnnnnnnnnnnnnnnnnnnnnnnnnnnnnnnnnnnnnnnnnnnnnnnnnnnnnnnnnnnnnnnnnnnnnnnnnnnnnnnnnnnnnnnnnnnnnnnnnnnnnnnnnnnnnnnnnnnnnnnnnnnnnnnnnnnnnnnnnnnnnnnnnnnnnnnnnnnnnnnnnnnnnnnnnnnnnnnnnnnnnnnnnnnnnnnnnnnnnnnnnnnnnnnnnnnnnnnnnnnnnnnnnnnnnnnnnnnnnnnnnnnnnnnnnnnnnnnnnnnnnnnnnnnnnnnnnnnnnnnnnnnnnnnnnnnnnnnnnnnnnnnnnnnnnnnnnnnnnnnnnnnnnnnnnnnnnnnnnnnnnnnnnnnnnnnnnnnnnnnnnnnnnnnnnnnnnnnnnnnnnnnnnnnnnnnnnnnnnnnnnnnnnnnnnnnnnnnnnnnnnnnnnnnnnnnnnnnnnnnnnnnnnnnnnnnnnnnnnnnnnnnnnnnnnnnnnnnnnnnnnnnnnnnnnnnnnnnnnnnnnnnnnnnnnnnnnnnnnnnnnnnnnnnnnnnnnnnnnnnnnnnnnnnnnnnnnnnnnnnnnnnnnnnnnnnnnnnnnnnnnnnnnnnnnnnnnnnnnnnnnnnnnnnnnnnnnnnnnnnnnnnnnnnnnnnnnnnnnnnnnnnnnnnnnnnnnnnnnnnnnnnnnnnnnnnnnnnnnnnnnnnnnnnnnnnnnnnnnnnnnnnnnnnnnnnnnnnnnnnnnnnnnnnnnnnnnnnnnnnnnnnnnnnnnnnnnnnnnnnnnnnnnnnnnnnnnnnnnnnnnnnnnnnnnnnnnnnnnnnnnnnnnnnnnnnnnnnnnnnnnnnnnnnnnnnnnnnnnnnnnnnnnnnnnnnnnnnnnnnnnnnnnnnnnnnnnnnnnnnnnnnnnnnnnnnnnnnnnnnnnnnnnnnnnnnnnnnnnnnnnnnnnnnnnnnnnnnnnnnnnnnnnnnnnnnnnnnnnnnnnnnnnnnnnnnnnnnnnnnnnnnnnnnnnnnnnnnnnnnnnnnnnnnnnnnnnnnnnnnnnnnnnnnnnnnnnnnnnnnnnnnnnnnnnnnnnnnnnnnnnnnnnnnnnnnnnnnnnnnnnnnnnnnnnnnnnnnnnnnnnnnnnnnnnnnnnnnnnnnnnnnnnnnnnnnnnnnnnnnnnnnnnnnnnnnnnnnnnnnnnnnnnnnnnnnnnnnnnnnnnnnnnnnnnnnnnnnnnnnnnnnnnnnnnnnnnnnnnnnnnnnnnnnnnnnnnnnnnnnnnnnnnnnnnnnnnnnnnnnnnnnnnnnnnnnnnnnnnnnnnnnnnnnnnnnnnnnnnnnnnnnnnnnnnnnnnnnnnnnnnnnnnnnnnnnnnnnnnnnnnnnnnnnnnnnnnnnnnnnnnnnnnnnnnnnnnnnnnnnnnnnnnnnnnnnnnnnnnnnnnnnnnnnnnnnnnnnnnnnnnnnnnnnnnnnnnnnnnnnnnnnnnnnnnnnnnnnnnnnnnnnnnnnnnnnnnnnnnnnnnnnnnnnnnnnnnnnnnnnnnnnnnnnnnnnnnnnnnnnnnnnnnnnnnnnnnnnnnnnnnnnnnnnnnnnnnnnnnnnnnnnnnnnnnnnnnnnnnnnnnnnnnnnnnnnnnnnnnnnnnnnnnnnnnnnnnnnnnnnnnnnnnnnnnnnnnnnnnnnnnnnnnnnnnnnnnnnnnnnnnnnnnnnnnnnnnnnnnnnnnnnnnnnnnnnnnnnnnnnnnnnnnnnggtctcnnnnnngagaccnngtc

SEQ ID NO: 14 - DNA, 300040 bp, Artificial Sequence
  source: /note="Description of Artificial Sequence: Synthetic polynucleotide"
  modified_base (9)..(14): a, c, t, or g
  modified_base (21)..(300020): a, c, t, or g
  misc_feature (21)..(300020): /note="This region may encompass 0-300000 nucleotides"
  modified_base (300027)..(300032): a, c, t, or g
  source: /note="See specification as filed for detailed description of substitutions and preferred embodiments"
gaagacgcnnnnnngtcttcnnnnnnnnnnnnnnnnnnnnnnnnnnnnnnnnnnnnnnnnnnnnnnnnnnnnnnnnnnnnnnnnnnnnnnnnnnnnnnnnnnnnnnnnnnnnnnnnnnnnnnnnnnnnnnnnnnnnnnnnnnnnnnnnnnnnnnnnnnnnnnnnnnnnnnnnnnnnnnnnnnnnnnnnnnnnnnnnnnnnnnnnnnnnnnnnnnnnnnnnnnnnnnnnnnnnnnnnnnnnnnnnnnnnnnnnnnnnnnnnnnnnnnnnnnnnnnnnnnnnnnnnnnnnnnnnnnnnnnnnnnnnnnnnnnnnnnnnnnnnnnnnnnnnnnnnnnnnnnnnnnnnnnnnnnnnnnnnnnnnnnnnnnnnnnnnnnnnnnnnnnnnnnnnnnnnnnnnnnnnnnnnnnnnnnnnnnnnnnnnnnnnnnnnnnnnnnnnnnnnnnnnnnnnnnnnnnnnnnnnnnnnnnnnnnnnnnnnnnnnnnnnnnnnnnnnnnnnnnnnnnnnnnnnnnnnnnnnnnnnnnnnnnnnnnnnnnnnnnnnnnnnnnnnnnnnnnnnnnnnnnnnnnnnnnnnnnnnnnnnnnnnnnnnnnnnnnnnnnnnnnnnnnnnnnnnnnnnnnnnnnnnnnnnnnnnnnnnnnnnnnnnnnnnnnnnnnnnnnnnnnnnnnnnnnnnnnnnnnnnnnnnnnnnnnnnnnnnnnnnnnnnnnnnnnnnnnnnnnnnnnnnnnnnnnnnnnnnnnnnnnnnnnnnnnnnnnnnnnnnnnnnnnnnnnnnnnnnnnnnnnnnnnnnnnnnnnnnnnnnnnnnnnnnnnnnnnnnnnnnnnnnnnnnnnnnnnnnnnnnnnnnnnnnnnnnnnnnnnnnnnnnnnnnnnnnnnnnnnnnnnnnnnnnnnnnnnnnnnnnnnnnnnnnnnnnnnnnnnnnnnnnnnnnnnnnnnnnnnnnnnnnnnnnnnnnnnnnnnnnnnnnnnnnnnnnnnnnnnnnnnnnnnnnnnnnnnnnnnnnnnnnnnnnnnnnnnnnnnnnnnnnnnnnnnnnnnnnnnnnnnnnnnnnnnnnnnnnnnnnnnnnnnnnnnnnnnnnnnnnnnnnnnnnnnnnnnnnnnnnnnnnnnnnnnnnnnnnnnnnnnnnnnnnnnnnnnnnnnnnnnnnnnnnnnnnnnnnnnnnnnnnnnnnnnnnnnnnnnnnnnnnnnnnnnnnnnnnnnnnnnnnnnnnnnnnnnnnnnnnnnnnnnnnnnnnnnnnnnnnnnnnnnnnnnnnnnnnnnnnnnnnnnnnnnnnnnnnnnnnnnnnnnnnnnnnnnnnnnnnnnnnnnnnnnnnnnnnnnnnnnnnnnnnnnnnnnnnnnnnnnnnnnnnnnnnnnnnnnnnnnnnnnnnnnnnnnnnnnnnnnnnnnnnnnnnnnnnnnnnnnnnnnnnnnnnnnnnnnnnnnnnnnnnnnnnnnnnnnnnnnnnnnnnnnnnnnnnnnnnnnnnnnnnnnnnnnnnnnnnnnnnnnnnnnnnnnnnnnnnnnnnnnnnnnnnnnnnnnnnnnnnnnnnnnnnnnnnnnnnnnnnnnnnnnnnnnnnnnnnnnnnnnnnnnnnnnnnnnnnnnnnnnnnnnnnnnnnnnnnnnnnnnnnnnnnnnnnnnnnnnnnnnnnnnnnnnnnnnnnnnnnnnnnnnnnnnnnnnnnnnnnnnnnnnnnnnnnnnnnnnnnnnnnnnnnnnnnnnnnnnnnnnnnnnnnnnnnnnnnnnnnnnnnnnnnnnnnnnnnnnnnnnnnnnnnnnnnnnnnnnnnnnnnnnnnnnnnnnnnnnnnnnnnnnnnnnnnnnnnnnnnnnnnnnnnnnnnnnnnnnnnnnnnnnnnnnnnnnnnnnnnnnnnnnnnnnnnnnnnnnnnnnnnnnnnnnnnnnnnnnnnnnnnnnnnnnnnnnnnnnnnnnnnnnnnnnnnnnnnnnnnnnnnnnnnnnnnnnnnnnnnnnnnnnnnnnnnnnnnnnnnnnnnnnnnnnnnnnnnnnnnnnnnnnnnnnnnnnnnnnnnnnnnnnnnnnnnnnnnnnnnnnnnnnnnnnnnnnnnnnnnnnnnnnnnnnnnnnnnnnnnnnnnnnnnnnnnnnnnnnnnnnnnnnnnnnnnnnnnnnnnnnnnnnnnnnnnnnnnnnnnnnnnnnnnnnnnnnnnnnnnnnnnnnnnnnnnnnnnnnnnnnnnnnnnnnnnnnnnnnnnnnnnnnnnnnnnnnnnnnnnnnnnnnnnnnnnnnnnnnnnnnnnnnnnnnnnnnnnnnnnnnnnnnnnnnnnnnnnnnnnnnnnnnnnnnnnnnnnnnnnnnnnnnnnnnnnnnnnnnnnnnnnnnnnnnnnnnnnnnnnnnnnnnnnnnnnnnnnnnnnnnnnnnnnnnnnnnnnnnnnnnnnnnnnnnnnnnnnnnnnnnnnnnnnnnnnnnnnnnnnnnnnnnnnnnnnnnnnnnnnnnnnnnnnnnnnnnnnnnnnnnnnnnnnnnnnnnnnnnnnnnnnnnnnnnnnnnnnnnnnnnnnnnnnnnnnnnnnnnnnnnnnnnnnnnnnnnnnnnnnnnnnnnnnnnnnnnnnnnnnnnnnnnnnnnnnnnnnnnnnnnnnnnnnnnnnnnnnnnnnnnnnnnnnnnnnnnnnnnnnnnnnnnnnnnnnnnnnnnnnnnnnnnnnnnnnnnnnnnnnnnnnnnnnnnnnnnnnnnnnnnnnnnnnnnnnnnnnnnnnnnnnnnnnnnnnnnnnnnnnnnnnnnnnnnnnnnnnnnnnnnnnnnnnnnnnnnnnnnnnnnnnnnnnnnnnnnnnnnnnnnnnnnnnnnnnnnnnnnnnnnnnnnnnnnnnnnnnnnnnnnnnnnnnnnnnnnnnnnnnnnnnnnnnnnnnnnnnnnnnnnnnnnnnnnnnnnnnnnnnnnnnnnnnnnnnnnnnnnnnnnnnnnnnnnnnnnnnnnnnnnnnnnnnnnnnnnnnnnnnnnnnnnnnnnnnnnnnnnnnnnnnnnnnnnnnnnnnnnnnnnnnnnnnnnnnnnnnnnnnnnnnnnnnnnnnnnnnnnnnnnnnnnnnnnnnnnnnnnnnnnnnnnnnnnnnnnnnnnnnnnnnnnnnnnnnnnnnnnnnnnnnnnnnnnnnnnnnnnnnnnnnnnnnnnnnnnnnnnnnnnnnnnnnnnnnnnnnnnnnnnnnnnnnnnnnnnnnnnnnnnnnnnnnnnnnnnnnnnnnnnnnnnnnnnnnnnnnnnnnnnnnnnnnnnnnnnnnnnnnnnnnnnnnnnnnnnnnnnnnnnnnnnnnnnnnnnnnnnnnnnnnnnnnnnnnnnnnnnnnnnnnnnnnnnnnnnnnnnnnnnnnnnnnnnnnnnnnnnnnnnnnnnnnnnnnnnnnnnnnnnnnnnnnnnnnnnnnnnnnnnnnnnnnnnnnnnnnnnnnnnnnnnnnnnnnnnnnnnnnnnnnnnnnnnnnnnnnnnnnnnnnnnnnnnnnnnnnnnnnnnnnnnnnnnnnnnnnnnnnnnnnnnnnnnnnnnnnnnnnnnnnnnnnnnnnnnnnnnnnnnnnnnnnnnnnnnnnnnnnnnnnnnnnnnnnnnnnnnnnnnnnnnnnnnnnnnnnnnnnnnnnnnnnnnnnnnnnnnnnnnnnnnnnnnnnnnnnnnnnnnnnnnnnnnnnnnnnnnnnnnnnnnnnnnnnnnnnnnnnnnnnnnnnnnnnnnnnnnnnnnnnnnnnnnnnnnnnnnnnnnnnnnnnnnnnnnnnnnnnnnnnnnnnnnnnnnnnnnnnnnnnnnnnnnnnnnnnnnnnnnnnnnnnnnnnnnnnnnnnnnnnnnnnnnnnnnnnnnnnnnnnnnnnnnnnnnnnnnnnnnnnnnnnnnnnnnnnnnnnnnnnnnnnnnnnnnnnnnnnnnnnnnnnnnnnnnnnnnnnnnnnnnnnnnnnnnnnnnnnnnnnnnnnnnnnnnnnnnnnnnnnnnnnnnnnnnnnnnnnnnnnnnnnnnnnnnnnnnnnnnnnnnnnnnnnnnnnnnnnnnnnnnnnnnnnnnnnnnnnnnnnnnnnnnnnnnnnnnnnnnnnnnnnnnnnnnnnnnnnnnnnnnnnnnnnnnnnnnnnnnnnnnnnnnnnnnnnnnnnnnnnnnnnnnnnnnnnnnnnnnnnnnnnnnnnnnnnnnnnnnnnnnnnnnnnnnnnnnnnnnnnnnnnnnnnnnnnnnnnnnnnnnnnnnnnnnnnnnnnnnnnnnnnnnnnnnnnnnnnnnnnnnnnnnnnnnnnnnnnnnnnnnnnnnnnnnnnnnnnnnnnnnnnnnnnnnnnnnnnnnnnnnnnnnnnnnnnnnnnnnnnnnnnnnnnnnnnnnnnnnnnnnnnnnnnnnnnnnnnnnnnnnnnnnnnnnnnnnnnnnnnnnnnnnnnnnnnnnnnnnnnnnnnnnnnnnnnnnnnnnnnnnnnnnnnnnnnnnnnnnnnnnnnnnnnnnnnnnnnnnnnnnnnnnnnnnnnnnnnnnnnnnnnnnnnnnnnnnnnnnnnnnnnnnnnnnnnnnnnnnnnnnnnnnnnnnnnnnnnnnnnnnnnnnnnnnnnnnnnnnnnnnnnnnnnnnnnnnnnnnnnnnnnnnnnnnnnnnnnnnnnnnnnnnnnnnnnnnnnnnnnnnnnnnnnnnnnnnnnnnnnnnnnnnnnnnnnnnnnnnnnnnnnnnnnnnnnnnnnnnnnnnnnnnnnnnnnnnnnnnnnnnnnnnnnnnnnnnnnnnnnnnnnnnnnnnnnnnnnnnnnnnnnnnnnnnnnnnnnnnnnnnnnnnnnnnnnnnnnnnnnnnnnnnnnnnnnnnnnnnnnnnnnnnnnnnnnnnnnnnnnnnnnnnnnnnnnnnnnnnnnnnnnnnnnnnnnnnnnnnnnnnnnnnnnnnnnnnnnnnnnnnnnnnnnnnnnnnnnnnnnnnnnnnnnnnnnnnnnnnnnnnnnnnnnnnnnnnnnnnnnnnnnnnnnnnnnnnnnnnnnnnnnnnnnnnnnnnnnnnnnnnnnnnnnnnnnnnnnnnnnnnnnnnnnnnnnnnnnnnnnnnnnnnnnnnnnnnnnnnnnnnnnnnnnnnnnnnnnnnnnnnnnnnnnnnnnnnnnnnnnnnnnnnnnnnnnnnnnnnnnnnnnnnnnnnnnnnnnnnnnnnnnnnnnnnnnnnnnnnnnnnnnnnnnnnnnnnnnnnnnnnnnnnnnnnnnnnnnnnnnnnnnnnnnnnnnnnnnnnnnnnnnnnnnnnnnnnnnnnnnnnnnnnnnnnnnnnnnnnnnnnnnnnnnnnnnnnnnnnnnnnnnnnnnnnnnnnnnnnnnnnnnnnnnnnnnnnnnnnnnnnnnnnnnnnnnnnnnnnnnnnnnnnnnnnnnnnnnnnnnnnnnnnnnnnnnnnnnnnnnnnnnnnnnnnnnnnnnnnnnnnnnnnnnnnnnnnnnnnnnnnnnnnnnnnnnnnnnnnnnnnnnnnnnnnnnnnnnnnnnnnnnnnnnnnnnnnnnnnnnnnnnnnnnnnnnnnnnnnnnnnnnnnnnnnnnnnnnnnnnnnnnnnnnnnnnnnnnnnnnnnnnnnnnnnnnnnnnnnnnnnnnnnnnnnnnnnnnnnnnnnnnnnnnnnnnnnnnnnnnnnnnnnnnnnnnnnnnnnnnnnnnnnnnnnnnnnnnnnnnnnnnnnnnnnnnnnnnnnnnnnnnnnnnnnnnnnnnnnnnnnnnnnnnnnnnnnnnnnnnnnnnnnnnnnnnnnnnnnnnnnnnnnnnnnnnnnnnnnnnnnnnnnnnnnnnnnnnnnnnnnnnnnnnnnnnnnnnnnnnnnnnnnnnnnnnnnnnnnnnnnnnnnnnnnnnnnnnnnnnnnnnnnnnnnnnnnnnnnnnnnnnnnnnnnnnnnnnnnnnnnnnnnnnnnnnnnnnnnnnnnnnnnnnnnnnnnnnnnnnnnnnnnnnnnnnnnnnnnnnnnnnnnnnnnnnnnnnnnnnnnnnnnnnnnnnnnnnnnnnnnnnnnnnnnnnnnnnnnnnnnnnnnnnnnnnnnnnnnnnnnnnnnnnnnnnnnnnnnnnnnnnnnnnnnnnnnnnnnnnnnnnnnnnnnnnnnnnnnnnnnnnnnnnnnnnnnnnnnnnnnnnnnnnnnnnnnnnnnnnnnnnnnnnnnnnnnnnnnnnnnnnnnnnnnnnnnnnnnnnnnnnnnnnnnnnnnnnnnnnnnnnnnnnnnnnnnnnnnnnnnnnnnnnnnnnnnnnnnnnnnnnnnnnnnnnnnnnnnnnnnnnnnnnnnnnnnnnnnnnnnnnnnnnnnnnnnnnnnnnnnnnnnnnnnnnnnnnnnnnnnnnnnnnnnnnnnnnnnnnnnnnnnnnnnnnnnnnnnnnnnnnnnnnnnnnnnnnnnnnnnnnnnnnnnnnnnnnnnnnnnnnnnnnnnnnnnnnnnnnnnnnnnnnnnnnnnnnnnnnnnnnnnnnnnnnnnnnnnnnnnnnnnnnnnnnnnnnnnnnnnnnnnnnnnnnnnnnnnnnnnnnnnnnnnnnnnnnnnnnnnnnnnnnnnnnnnnnnnnnnnnnnnnnnnnnnnnnnnnnnnnnnnnnnnnnnnnnnnnnnnnnnnnnnnnnnnnnnnnnnnnnnnnnnnnnnnnnnnnnnnnnnnnnnnnnnnnnnnnnnnnnnnnnnnnnnnnnnnnnnnnnnnnnnnnnnnnnnnnnnnnnnnnnnnnnnnnnnnnnnnnnnnnnnnnnnnnnnnnnnnnnnnnnnnnnnnnnnnnnnnnnnnnnnnnnnnnnnnnnnnnnnnnnnnnnnnnnnnnnnnnnnnnnnnnnnnnnnnnnnnnnnnnnnnnnnnnnnnnnnnnnnnnnnnnnnnnnnnnnnnnnnnnnnnnnnnnnnnnnnnnnnnnnnnnnnnnnnnnnnnnnnnnnnnnnnnnnnnnnnnnnnnnnnnnnnnnnnnnnnnnnnnnnnnnnnnnnnnnnnnnnnnnnnnnnnnnnnnnnnnnnnnnnnnnnnnnnnnnnnnnnnnnnnnnnnnnnnnnnnnnnnnnnnnnnnnnnnnnnnnnnnnnnnnnnnnnnnnnnnnnnnnnnnnnnnnnnnnnnnnnnnnnnnnnnnnnnnnnnnnnnnnnnnnnnnnnnnnnnnnnnnnnnnnnnnnnnnnnnnnnnnnnnnnnnnnnnnnnnnnnnnnnnnnnnnnnnnnnnnnnnnnnnnnnnnnnnnnnnnnnnnnnnnnnnnnnnnnnnnnnnnnnnnnnnnnnnnnnnnnnnnnnnnnnnnnnnnnnnnnnnnnnnnnnnnnnnnnnnnnnnnnnnnnnnnnnnnnnnnnnnnnnnnnnnnnnnnnnnnnnnnnnnnnnnnnnnnnnnnnnnnnnnnnnnnnnnnnnnnnnnnnnnnnnnnnnnnnnnnnnnnnnnnnnnnnnnnnnnnnnnnnnnnnnnnnnnnnnnnnnnnnnnnnnnnnnnnnnnnnnnnnnnnnnnnnnnnnnnnnnnnnnnnnnnnnnnnnnnnnnnnnnnnnnnnnnnnnnnnnnnnnnnnnnnnnnnnnnnnnnnnnnnnnnnnnnnnnnnnnnnnnnnnnnnnnnnnnnnnnnnnnnnnnnnnnnnnnnnnnnnnnnnnnnnnnnnnnnnnnnnnnnnnnnnnnnnnnnnnnnnnnnnnnnnnnnnnnnnnnnnnnnnnnnnnnnnnnnnnnnnnnnnnnnnnnnnnnnnnnnnnnnnnnnnnnnnnnnnnnnnnnnnnnnnnnnnnnnnnnnnnnnnnnnnnnnnnnnnnnnnnnnnnnnnnnnnnnnnnnnnnnnnnnnnnnnnnnnnnnnnnnnnnnnnnnnnnnnnnnnnnnnnnnnnnnnnnnnnnnnnnnnnnnnnnnnnnnnnnnnnnnnnnnnnnnnnnnnnnnnnnnnnnnnnnnnnnnnnnnnnnnnnnnnnnnnnnnnnnnnnnnnnnnnnnnnnnnnnnnnnnnnnnnnnnnnnnnnnnnnnnnnnnnnnnnnnnnnnnnnnnnnnnnnnnnnnnnnnnnnnnnnnnnnnnnnnnnnnnnnnnnnnnnnnnnnnnnnnnnnnnnnnnnnnnnnnnnnnnnnnnnnnnnnnnnnnnnnnnnnnnnnnnnnnnnnnnnnnnnnnnnnnnnnnnnnnnnnnnnnnnnnnnnnnnnnnnnnnnnnnnnnnnnnnnnnnnnnnnnnnnnnnnnnnnnnnnnnnnnnnnnnnnnnnnnnnnnnnnnnnnnnnnnnnnnnnnnnnnnnnnnnnnnnnnnnnnnnnnnnnnnnnnnnnnnnnnnnnnnnnnnnnnnnnnnnnnnnnnnnnnnnnnnnnnnnnnnnnnnnnnnnnnnnnnnnnnnnnnnnnnnnnnnnnnnnnnnnnnnnnnnnnnnnnnnnnnnnnnnnnnnnnnnnnnnnnnnnnnnnnnnnnnnnnnnnnnnnnnnnnnnnnnnnnnnnnnnnnnnnnnnnnnnnnnnnnnnnnnnnnnnnnnnnnnnnnnnnnnnnnnnnnnnnnnnnnnnnnnnnnnnnnnnnnnnnnnnnnnnnnnnnnnnnnnnnnnnnnnnnnnnnnnnnnnnnnnnnnnnnnnnnnnnnnnnnnnnnnnnnnnnnnnnnnnnnnnnnnnnnnnnnnnnnnnnnnnnnnnnnnnnnnnnnnnnnnnnnnnnnnnnnnnnnnnnnnnnnnnnnnnnnnnnnnnnnnnnnnnnnnnnnnnnnnnnnnnnnnnnnnnnnnnnnnnnnnnnnnnnnnnnnnnnnnnnnnnnnnnnnnnnnnnnnnnnnnnnnnnnnnnnnnnnnnnnnnnnnnnnnnnnnnnnnnnnnnnnnnnnnnnnnnnnnnnnnnnnnnnnnnnnnnnnnnnnnnnnnnnnnnnnnnnnnnnnnnnnnnnnnnnnnnnnnnnnnnnnnnnnnnnnnnnnnnnnnnnnnnnnnnnnnnnnnnnnnnnnnnnnnnnnnnnnnnnnnnnnnnnnnnnnnnnnnnnnnnnnnnnnnnnnnnnnnnnnnnnnnnnnnnnnnnnnnnnnnnnnnnnnnnnnnnnnnnnnnnnnnnnnnnnnnnnnnnnnnnnnnnnnnnnnnnnnnnnnnnnnnnnnnnnnnnnnnnnnnnnnnnnnnnnnnnnnnnnnnnnnnnnnnnnnnnnnnnnnnnnnnnnnnnnnnnnnnnnnnnnnnnnnnnnnnnnnnnnnnnnnnnnnnnnnnnnnnnnnnnnnnnnnnnnnnnnnnnnnnnnnnnnnnnnnnnnnnnnnnnnnnnnnnnnnnnnnnnnnnnnnnnnnnnnnnnnnnnnnnnnnnnnnnnnnnnnnnnnnnnnnnnnnnnnnnnnnnnnnnnnnnnnnnnnnnnnnnnnnnnnnnnnnnnnnnnnnnnnnnnnnnnnnnnnnnnnnnnnnnnnnnnnnnnnnnnnnnnnnnnnnnnnnnnnnnnnnnnnnnnnnnnnnnnnnnnnnnnnnnnnnnnnnnnnnnnnnnnnnnnnnnnnnnnnnnnnnnnnnnnnnnnnnnnnnnnnnnnnnnnnnnnnnnnnnnnnnnnnnnnnnnnnnnnnnnnnnnnnnnnnnnnnnnnnnnnnnnnnnnnnnnnnnnnnnnnnnnnnnnnnnnnnnnnnnnnnnnnnnnnnnnnnnnnnnnnnnnnnnnnnnnnnnnnnnnnnnnnnnnnnnnnnnnnnnnnnnnnnnnnnnnnnnnnnnnnnnnnnnnnnnnnnnnnnnnnnnnnnnnnnnnnnnnnnnnnnnnnnnnnnnnnnnnnnnnnnnnnnnnnnnnnnnnnnnnnnnnnnnnnnnnnnnnnnnnnnnnnnnnnnnnnnnnnnnnnnnnnnnnnnnnnnnnnnnnnnnnnnnnnnnnnnnnnnnnnnnnnnnnnnnnnnnnnnnnnnnnnnnnnnnnnnnnnnnnnnnnnnnnnnnnnnnnnnnnnnnnnnnnnnnnnnnnnnnnnnnnnnnnnnnnnnnnnnnnnnnnnnnnnnnnnnnnnnnnnnnnnnnnnnnnnnnnnnnnnnnnnnnnnnnnnnnnnnnnnnnnnnnnnnnnnnnnnnnnnnnnnnnnnnnnnnnnnnnnnnnnnnnnnnnnnnnnnnnnnnnnnnnnnnnnnnnnnnnnnnnnnnnnnnnnnnnnnnnnnnnnnnnnnnnnnnnnnnnnnnnnnnnnnnnnnnnnnnnnnnnnnnnnnnnnnnnnnnnnnnnnnnnnnnnnnnnnnnnnnnnnnnnnnnnnnnnnnnnnnnnnnnnnnnnnnnnnnnnnnnnnnnnnnnnnnnnnnnnnnnnnnnnnnnnnnnnnnnnnnnnnnnnnnnnnnnnnnnnnnnnnnnnnnnnnnnnnnnnnnnnnnnnnnnnnnnnnnnnnnnnnnnnnnnnnnnnnnnnnnnnnnnnnnnnnnnnnnnnnnnnnnnnnnnnnnnnnnnnnnnnnnnnnnnnnnnnnnnnnnnnnnnnnnnnnnnnnnnnnnnnnnnnnnnnnnnnnnnnnnnnnnnnnnnnnnnnnnnnnnnnnnnnnnnnnnnnnnnnnnnnnnnnnnnnnnnnnnnnnnnnnnnnnnnnnnnnnnnnnnnnnnnnnnnnnnnnnnnnnnnnnnnnnnnnnnnnnnnnnnnnnnnnnnnnnnnnnnnnnnnnnnnnnnnnnnnnnnnnnnnnnnnnnnnnnnnnnnnnnnnnnnnnnnnnnnnnnnnnnnnnnnnnnnnnnnnnnnnnnnnnnnnnnnnnnnnnnnnnnnnnnnnnnnnnnnnnnnnnnnnnnnnnnnnnnnnnnnnnnnnnnnnnnnnnnnnnnnnnnnnnnnnnnnnnnnnnnnnnnnnnnnnnnnnnnnnnnnnnnnnnnnnnnnnnnnnnnnnnnnnnnnnnnnnnnnnnnnnnnnnnnnnnnnnnnnnnnnnnnnnnnnnnnnnnnnnnnnnnnnnnnnnnnnnnnnnnnnnnnnnnnnnnnnnnnnnnnnnnnnnnnnnnnnnnnnnnnnnnnnnnnnnnnnnnnnnnnnnnnnnnnnnnnnnnnnnnnnnnnnnnnnnnnnnnnnnnnnnnnnnnnnnnnnnnnnnnnnnnnnnnnnnnnnnnnnnnnnnnnnnnnnnnnnnnnnnnnnnnnnnnnnnnnnnnnnnnnnnnnnnnnnnnnnnnnnnnnnnnnnnnnnnnnnnnnnnnnnnnnnnnnnnnnnnnnnnnnnnnnnnnnnnnnnnnnnnnnnnnnnnnnnnnnnnnnnnnnnnnnnnnnnnnnnnnnnnnnnnnnnnnnnnnnnnnnnnnnnnnnnnnnnnnnnnnnnnnnnnnnnnnnnnnnnnnnnnnnnnnnnnnnnnnnnnnnnnnnnnnnnnnnnnnnnnnnnnnnnnnnnnnnnnnnnnnnnnnnnnnnnnnnnnnnnnnnnnnnnnnnnnnnnnnnnnnnnnnnnnnnnnnnnnnnnnnnnnnnnnnnnnnnnnnnnnnnnnnnnnnnnnnnnnnnnnnnnnnnnnnnnnnnnnnnnnnnnnnnnnnnnnnnnnnnnnnnnnnnnnnnnnnnnnnnnnnnnnnnnnnnnnnnnnnnnnnnnnnnnnnnnnnnnnnnnnnnnnnnnnnnnnnnnnnnnnnnnnnnnnnnnnnnnnnnnnnnnnnnnnnnnnnnnnnnnnnnnnnnnnnnnnnnnnnnnnnnnnnnnnnnnnnnnnnnnnnnnnnnnnnnnnnnnnnnnnnnnnnnnnnnnnnnnnnnnnnnnnnnnnnnnnnnnnnnnnnnnnnnnnnnnnnnnnnnnnnnnnnnnnnnnnnnnnnnnnnnnnnnnnnnnnnnnnnnnnnnnnnnnnnnnnnnnnnnnnnnnnnnnnnnnnnnnnnnnnnnnnnnnnnnnnnnnnnnnnnnnnnnnnnnnnnnnnnnnnnnnnnnnnnnnnnnnnnnnnnnnnnnnnnnnnnnnnnnnnnnnnnnnnnnnnnnnnnnnnnnnnnnnnnnnnnnnnnnnnnnnnnnnnnnnnnnnnnnnnnnnnnnnnnnnnnnnnnnnnnnnnnnnnnnnnnnnnnnnnnnnnnnnnnnnnnnnnnnnnnnnnnnnnnnnnnnnnnnnnnnnnnnnnnnnnnnnnnnnnnnnnnnnnnnnnnnnnnnnnnnnnnnnnnnnnnnnnnnnnnnnnnnnnnnnnnnnnnnnnnnnnnnnnnnnnnnnnnnnnnnnnnnnnnnnnnnnnnnnnnnnnnnnnnnnnnnnnnnnnnnnnnnnnnnnnnnnnnnnnnnnnnnnnnnnnnnnnnnnnnnnnnnnnnnnnnnnnnnnnnnnnnnnnnnnnnnnnnnnnnnnnnnnnnnnnnnnnnnnnnnnnnnnnnnnnnnnnnnnnnnnnnnnnnnnnnnnnnnnnnnnnnnnnnnnnnnnnnnnnnnnnnnnnnnnnnnnnnnnnnnnnnnnnnnnnnnnnnnnnnnnnnnnnnnnnnnnnnnnnnnnnnnnnnnnnnnnnnnnnnnnnnnnnnnnnnnnnnnnnnnnnnnnnnnnnnnnnnnnnnnnnnnnnnnnnnnnnnnnnnnnnnnnnnnnnnnnnnnnnnnnnnnnnnnnnnnnnnnnnnnnnnnnnnnnnnnnnnnnnnnnnnnnnnnnnnnnnnnnnnnnnnnnnnnnnnnnnnnnnnnnnnnnnnnnnnnnnnnnnnnnnnnnnnnnnnnnnnnnnnnnnnnnnnnnnnnnnnnnnnnnnnnnnnnnnnnnnnnnnnnnnnnnnnnnnnnnnnnnnnnnnnnnnnnnnnnnnnnnnnnnnnnnnnnnnnnnnnnnnnnnnnnnnnnnnnnnnnnnnnnnnnnnnnnnnnnnnnnnnnnnnnnnnnnnnnnnnnnnnnnnnnnnnnnnnnnnnnnnnnnnnnnnnnnnnnnnnnnnnnnnnnnnnnnnnnnnnnnnnnnnnnnnnnnnnnnnnnnnnnnnnnnnnnnnnnnnnnnnnnnnnnnnnnnnnnnnnnnnnnnnnnnnnnnnnnnnnnnnnnnnnnnnnnnnnnnnnnnnnnnnnnnnnnnnnnnnnnnnnnnnnnnnnnnnnnnnnnnnnnnnnnnnnnnnnnnnnnnnnnnnnnnnnnnnnnnnnnnnnnnnnnnnnnnnnnnnnnnnnnnnnnnnnnnnnnnnnnnnnnnnnnnnnnnnnnnnnnnnnnnnnnnnnnnnnnnnnnnnnnnnnnnnnnnnnnnnnnnnnnnnnnnnnnnnnnnnnnnnnnnnnnnnnnnnnnnnnnnnnnnnnnnnnnnnnnnnnnnnnnnnnnnnnnnnnnnnnnnnnnnnnnnnnnnnnnnnnnnnnnnnnnnnnnnnnnnnnnnnnnnnnnnnnnnnnnnnnnnnnnnnnnnnnnnnnnnnnnnnnnnnnnnnnnnnnnnnnnnnnnnnnnnnnnnnnnnnnnnnnnnnnnnnnnnnnnnnnnnnnnnnnnnnnnnnnnnnnnnnnnnnnnnnnnnnnnnnnnnnnnnnnnnnnnnnnnnnnnnnnnnnnnnnnnnnnnnnnnnnnnnnnnnnnnnnnnnnnnnnnnnnnnnnnnnnnnnnnnnnnnnnnnnnnnnnnnnnnnnnnnnnnnnnnnnnnnnnnnnnnnnnnnnnnnnnnnnnnnnnnnnnnnnnnnnnnnnnnnnnnnnnnnnnnnnnnnnnnnnnnnnnnnnnnnnnnnnnnnnnnnnnnnnnnnnnnnnnnnnnnnnnnnnnnnnnnnnnnnnnnnnnnnnnnnnnnnnnnnnnnnnnnnnnnnnnnnnnnnnnnnnnnnnnnnnnnnnnnnnnnnnnnnnnnnnnnnnnnnnnnnnnnnnnnnnnnnnnnnnnnnnnnnnnnnnnnnnnnnnnnnnnnnnnnnnnnnnnnnnnnnnnnnnnnnnnnnnnnnnnnnnnnnnnnnnnnnnnnnnnnnnnnnnnnnnnnnnnnnnnnnnnnnnnnnnnnnnnnnnnnnnnnnnnnnnnnnnnnnnnnnnnnnnnnnnnnnnnnnnnnnnnnnnnnnnnnnnnnnnnnnnnnnnnnnnnnnnnnnnnnnnnnnnnnnnnnnnnnnnnnnnnnnnnnnnnnnnnnnnnnnnnnnnnnnnnnnnnnnnnnnnnnnnnnnnnnnnnnnnnnnnnnnnnnnnnnnnnnnnnnnnnnnnnnnnnnnnnnnnnnnnnnnnnnnnnnnnnnnnnnnnnnnnnnnnnnnnnnnnnnnnnnnnnnnnnnnnnnnnnnnnnnnnnnnnnnnnnnnnnnnnnnnnnnnnnnnnnnnnnnnnnnnnnnnnnnnnnnnnnnnnnnnnnnnnnnnnnnnnnnnnnnnnnnnnnnnnnnnnnnnnnnnnnnnnnnnnnnnnnnnnnnnnnnnnnnnnnnnnnnnnnnnnnnnnnnnnnnnnnnnnnnnnnnnnnnnnnnnnnnnnnnnnnnnnnnnnnnnnnnnnnnnnnnnnnnnnnnnnnnnnnnnnnnnnnnnnnnnnnnnnnnnnnnnnnnnnnnnnnnnnnnnnnnnnnnnnnnnnnnnnnnnnnnnnnnnnnnnnnnnnnnnnnnnnnnnnnnnnnnnnnnnnnnnnnnnnnnnnnnnnnnnnnnnnnnnnnnnnnnnnnnnnnnnnnnnnnnnnnnnnnnnnnnnnnnnnnnnnnnnnnnnnnnnnnnnnnnnnnnnnnnnnnnnnnnnnnnnnnnnnnnnnnnnnnnnnnnnnnnnnnnnnnnnnnnnnnnnnnnnnnnnnnnnnnnnnnnnnnnnnnnnnnnnnnnnnnnnnnnnnnnnnnnnnnnnnnnnnnnnnnnnnnnnnnnnnnnnnnnnnnnnnnnnnnnnnnnnnnnnnnnnnnnnnnnnnnnnnnnnnnnnnnnnnnnnnnnnnnnnnnnnnnnnnnnnnnnnnnnnnnnnnnnnnnnnnnnnnnnnnnnnnnnnnnnnnnnnnnnnnnnnnnnnnnnnnnnnnnnnnnnnnnnnnnnnnnnnnnnnnnnnnnnnnnnnnnnnnnnnnnnnnnnnnnnnnnnnnnnnnnnnnnnnnnnnnnnnnnnnnnnnnnnnnnnnnnnnnnnnnnnnnnnnnnnnnnnnnnnnnnnnnnnnnnnnnnnnnnnnnnnnnnnnnnnnnnnnnnnnnnnnnnnnnnnnnnnnnnnnnnnnnnnnnnnnnnnnnnnnnnnnnnnnnnnnnnnnnnnnnnnnnnnnnnnnnnnnnnnnnnnnnnnnnnnnnnnnnnnnnnnnnnnnnnnnnnnnnnnnnnnnnnnnnnnnnnnnnnnnnnnnnnnnnnnnnnnnnnnnnnnnnnnnnnnnnnnnnnnnnnnnnnnnnnnnnnnnnnnnnnnnnnnnnnnnnnnnnnnnnnnnnnnnnnnnnnnnnnnnnnnnnnnnnnnnnnnnnnnnnnnnnnnnnnnnnnnnnnnnnnnnnnnnnnnnnnnnnnnnnnnnnnnnnnnnnnnnnnnnnnnnnnnnnnnnnnnnnnnnnnnnnnnnnnnnnnnnnnnnnnnnnnnnnnnnnnnnnnnnnnnnnnnnnnnnnnnnnnnnnnnnnnnnnnnnnnnnnnnnnnnnnnnnnnnnnnnnnnnnnnnnnnnnnnnnnnnnnnnnnnnnnnnnnnnnnnnnnnnnnnnnnnnnnnnnnnnnnnnnnnnnnnnnnnnnnnnnnnnnnnnnnnnnnnnnnnnnnnnnnnnnnnnnnnnnnnnnnnnnnnnnnnnnnnnnnnnnnnnnnnnnnnnnnnnnnnnnnnnnnnnnnnnnnnnnnnnnnnnnnnnnnnnnnnnnnnnnnnnnnnnnnnnnnnnnnnnnnnnnnnnnnnnnnnnnnnnnnnnnnnnnnnnnnnnnnnnnnnnnnnnnnnnnnnnnnnnnnnnnnnnnnnnnnnnnnnnnnnnnnnnnnnnnnnnnnnnnnnnnnnnnnnnnnnnnnnnnnnnnnnnnnnnnnnnnnnnnnnnnnnnnnnnnnnnnnnnnnnnnnnnnnnnnnnnnnnnnnnnnnnnnnnnnnnnnnnnnnnnnnnnnnnnnnnnnnnnnnnnnnnnnnnnnnnnnnnnnnnnnnnnnnnnnnnnnnnnnnnnnnnnnnnnnnnnnnnnnnnnnnnnnnnnnnnnnnnnnnnnnnnnnnnnnnnnnnnnnnnnnnnnnnnnnnnnnnnnnnnnnnnnnnnnnnnnnnnnnnnnnnnnnnnnnnnnnnnnnnnnnnnnnnnnnnnnnnnnnnnnnnnnnnnnnnnnnnnnnnnnnnnnnnnnnnnnnnnnnnnnnnnnnnnnnnnnnnnnnnnnnnnnnnnnnnnnnnnnnnnnnnnnnnnnnnnnnnnnnnnnnnnnnnnnnnnnnnnnnnnnnnnnnnnnnnnnnnnnnnnnnnnnnnnnnnnnnnnnnnnnnnnnnnnnnnnnnnnnnnnnnnnnnnnnnnnnnnnnnnnnnnnnnnnnnnnnnnnnnnnnnnnnnnnnnnnnnnnnnnnnnnnnnnnnnnnnnnnnnnnnnnnnnnnnnnnnnnnnnnnnnnnnnnnnnnnnnnnnnnnnnnnnnnnnnnnnnnnnnnnnnnnnnnnnnnnnnnnnnnnnnnnnnnnnnnnnnnnnnnnnnnnnnnnnnnnnnnnnnnnnnnnnnnnnnnnnnnnnnnnnnnnnnnnnnnnnnnnnnnnnnnnnnnnnnnnnnnnnnnnnnnnnnnnnnnnnnnnnnnnnnnnnnnnnnnnnnnnnnnnnnnnnnnnnnnnnnnnnnnnnnnnnnnnnnnnnnnnnnnnnnnnnnnnnnnnnnnnnnnnnnnnnnnnnnnnnnnnnnnnnnnnnnnnnnnnnnnnnnnnnnnnnnnnnnnnnnnnnnnnnnnnnnnnnnnnnnnnnnnnnnnnnnnnnnnnnnnnnnnnnnnnnnnnnnnnnnnnnnnnnnnnnnnnnnnnnnnnnnnnnnnnnnnnnnnnnnnnnnnnnnnnnnnnnnnnnnnnnnnnnnnnnnnnnnnnnnnnnnnnnnnnnnnnnnnnnnnnnnnnnnnnnnnnnnnnnnnnnnnnnnnnnnnnnnnnnnnnnnnnnnnnnnnnnnnnnnnnnnnnnnnnnnnnnnnnnnnnnnnnnnnnnnnnnnnnnnnnnnnnnnnnnnnnnnnnnnnnnnnnnnnnnnnnnnnnnnnnnnnnnnnnnnnnnnnnnnnnnnnnnnnnnnnnnnnnnnnnnnnnnnnnnnnnnnnnnnnnnnnnnnnnnnnnnnnnnnnnnnnnnnnnnnnnnnnnnnnnnnnnnnnnnnnnnnnnnnnnnnnnnnnnnnnnnnnnnnnnnnnnnnnnnnnnnnnnnnnnnnnnnnnnnnnnnnnnnnnnnnnnnnnnnnnnnnnnnnnnnnnnnnnnnnnnnnnnnnnnnnnnnnnnnnnnnnnnnnnnnnnnnnnnnnnnnnnnnnnnnnnnnnnnnnnnnnnnnnnnnnnnnnnnnnnnnnnnnnnnnnnnnnnnnnnnnnnnnnnnnnnnnnnnnnnnnnnnnnnnnnnnnnnnnnnnnnnnnnnnnnnnnnnnnnnnnnnnnnnnnnnnnnnnnnnnnnnnnnnnnnnnnnnnnnnnnnnnnnnnnnnnnnnnnnnnnnnnnnnnnnnnnnnnnnnnnnnnnnnnnnnnnnnnnnnnnnnnnnnnnnnnnnnnnnnnnnnnnnnnnnnnnnnnnnnnnnnnnnnnnnnnnnnnnnnnnnnnnnnnnnnnnnnnnnnnnnnnnnnnnnnnnnnnnnnnnnnnnnnnnnnnnnnnnnnnnnnnnnnnnnnnnnnnnnnnnnnnnnnnnnnnnnnnnnnnnnnnnnnnnnnnnnnnnnnnnnnnnnnnnnnnnnnnnnnnnnnnnnnnnnnnnnnnnnnnnnnnnnnnnnnnnnnnnnnnnnnnnnnnnnnnnnnnnnnnnnnnnnnnnnnnnnnnnnnnnnnnnnnnnnnnnnnnnnnnnnnnnnnnnnnnnnnnnnnnnnnnnnnnnnnnnnnnnnnnnnnnnnnnnnnnnnnnnnnnnnnnnnnnnnnnnnnnnnnnnnnnnnnnnnnnnnnnnnnnnnnnnnnnnnnnnnnnnnnnnnnnnnnnnnnnnnnnnnnnnnnnnnnnnnnnnnnnnnnnnnnnnnnnnnnnnnnnnnnnnnnnnnnnnnnnnnnnnnnnnnnnnnnnnnnnnnnnnnnnnnnnnnnnnnnnnnnnnnnnnnnnnnnnnnnnnnnnnnnnnnnnnnnnnnnnnnnnnnnnnnnnnnnnnnnnnnnnnnnnnnnnnnnnnnnnnnnnnnnnnnnnnnnnnnnnnnnnnnnnnnnnnnnnnnnnnnnnnnnnnnnnnnnnnnnnnnnnnnnnnnnnnnnnnnnnnnnnnnnnnnnnnnnnnnnnnnnnnnnnnnnnnnnnnnnnnnnnnnnnnnnnnnnnnnnnnnnnnnnnnnnnnnnnnnnnnnnnnnnnnnnnnnnnnnnnnnnnnnnnnnnnnnnnnnnnnnnnnnnnnnnnnnnnnnnnnnnnnnnnnnnnnnnnnnnnnnnnnnnnnnnnnnnnnnnnnnnnnnnnnnnnnnnnnnnnnnnnnnnnnnnnnnnnnnnnnnnnnnnnnnnnnnnnnnnnnnnnnnnnnnnnnnnnnnnnnnnnnnnnnnnnnnnnnnnnnnnnnnnnnnnnnnnnnnnnnnnnnnnnnnnnnnnnnnnnnnnnnnnnnnnnnnnnnnnnnnnnnnnnnnnnnnnnnnnnnnnnnnnnnnnnnnnnnnnnnnnnnnnnnnnnnnnnnnnnnnnnnnnnnnnnnnnnnnnnnnnnnnnnnnnnnnnnnnnnnnnnnnnnnnnnnnnnnnnnnnnnnnnnnnnnnnnnnnnnnnnnnnnnnnnnnnnnnnnnnnnnnnnnnnnnnnnnnnnnnnnnnnnnnnnnnnnnnnnnnnnnnnnnnnnnnnnnnnnnnnnnnnnnnnnnnnnnnnnnnnnnnnnnnnnnnnnnnnnnnnnnnnnnnnnnnnnnnnnnnnnnnnnnnnnnnnnnnnnnnnnnnnnnnnnnnnnnnnnnnnnnnnnnnnnnnnnnnnnnnnnnnnnnnnnnnnnnnnnnnnnnnnnnnnnnnnnnnnnnnnnnnnnnnnnnnnnnnnnnnnnnnnnnnnnnnnnnnnnnnnnnnnnnnnnnnnnnnnnnnnnnnnnnnnnnnnnnnnnnnnnnnnnnnnnnnnnnnnnnnnnnnnnnnnnnnnnnnnnnnnnnnnnnnnnnnnnnnnnnnnnnnnnnnnnnnnnnnnnnnnnnnnnnnnnnnnnnnnnnnnnnnnnnnnnnnnnnnnnnnnnnnnnnnnnnnnnnnnnnnnnnnnnnnnnnnnnnnnnnnnnnnnnnnnnnnnnnnnnnnnnnnnnnnnnnnnnnnnnnnnnnnnnnnnnnnnnnnnnnnnnnnnnnnnnnnnnnnnnnnnnnnnnnnnnnnnnnnnnnnnnnnnnnnnnnnnnnnnnnnnnnnnnnnnnnnnnnnnnnnnnnnnnnnnnnnnnnnnnnnnnnnnnnnnnnnnnnnnnnnnnnnnnnnnnnnnnnnnnnnnnnnnnnnnnnnnnnnnnnnnnnnnnnnnnnnnnnnnnnnnnnnnnnnnnnnnnnnnnnnnnnnnnnnnnnnnnnnnnnnnnnnnnnnnnnnnnnnnnnnnnnnnnnnnnnnnnnnnnnnnnnnnnnnnnnnnnnnnnnnnnnnnnnnnnnnnnnnnnnnnnnnnnnnnnnnnnnnnnnnnnnnnnnnnnnnnnnnnnnnnnnnnnnnnnnnnnnnnnnnnnnnnnnnnnnnnnnnnnnnnnnnnnnnnnnnnnnnnnnnnnnnnnnnnnnnnnnnnnnnnnnnnnnnnnnnnnnnnnnnnnnnnnnnnnnnnnnnnnnnnnnnnnnnnnnnnnnnnnnnnnnnnnnnnnnnnnnnnnnnnnnnnnnnnnnnnnnnnnnnnnnnnnnnnnnnnnnnnnnnnnnnnnnnnnnnnnnnnnnnnnnnnnnnnnnnnnnnnnnnnnnnnnnnnnnnnnnnnnnnnnnnnnnnnnnnnnnnnnnnnnnnnnnnnnnnnnnnnnnnnnnnnnnnnnnnnnnnnnnnnnnnnnnnnnnnnnnnnnnnnnnnnnnnnnnnnnnnnnnnnnnnnnnnnnnnnnnnnnnnnnnnnnnnnnnnnnnnnnnnnnnnnnnnnnnnnnnnnnnnnnnnnnnnnnnnnnnnnnnnnnnnnnnnnnnnnnnnnnnnnnnnnnnnnnnnnnnnnnnnnnnnnnnnnnnnnnnnnnnnnnnnnnnnnnnnnnnnnnnnnnnnnnnnnnnnnnnnnnnnnnnnnnnnnnnnnnnnnnnnnnnnnnnnnnnnnnnnnnnnnnnnnnnnnnnnnnnnnnnnnnnnnnnnnnnnnnnnnnnnnnnnnnnnnnnnnnnnnnnnnnnnnnnnnnnnnnnnnnnnnnnnnnnnnnnnnnnnnnnnnnnnnnnnnnnnnnnnnnnnnnnnnnnnnnnnnnnnnnnnnnnnnnnnnnnnnnnnnnnnnnnnnnnnnnnnnnnnnnnnnnnnnnnnnnnnnnnnnnnnnnnnnnnnnnnnnnnnnnnnnnnnnnnnnnnnnnnnnnnnnnnnnnnnnnnnnnnnnnnnnnnnnnnnnnnnnnnnnnnnnnnnnnnnnnnnnnnnnnnnnnnnnnnnnnnnnnnnnnnnnnnnnnnnnnnnnnnnnnnnnnnnnnnnnnnnnnnnnnnnnnnnnnnnnnnnnnnnnnnnnnnnnnnnnnnnnnnnnnnnnnnnnnnnnnnnnnnnnnnnnnnnnnnnnnnnnnnnnnnnnnnnnnnnnnnnnnnnnnnnnnnnnnnnnnnnnnnnnnnnnnnnnnnnnnnnnnnnnnnnnnnnnnnnnnnnnnnnnnnnnnnnnnnnnnnnnnnnnnnnnnnnnnnnnnnnnnnnnnnnnnnnnnnnnnnnnnnnnnnnnnnnnnnnnnnnnnnnnnnnnnnnnnnnnnnnnnnnnnnnnnnnnnnnnnnnnnnnnnnnnnnnnnnnnnnnnnnnnnnnnnnnnnnnnnnnnnnnnnnnnnnnnnnnnnnnnnnnnnnnnnnnnnnnnnnnnnnnnnnnnnnnnnnnnnnnnnnnnnnnnnnnnnnnnnnnnnnnnnnnnnnnnnnnnnnnnnnnnnnnnnnnnnnnnnnnnnnnnnnnnnnnnnnnnnnnnnnnnnnnnnnnnnnnnnnnnnnnnnnnnnnnnnnnnnnnnnnnnnnnnnnnnnnnnnnnnnnnnnnnnnnnnnnnnnnnnnnnnnnnnnnnnnnnnnnnnnnnnnnnnnnnnnnnnnnnnnnnnnnnnnnnnnnnnnnnnnnnnnnnnnnnnnnnnnnnnnnnnnnnnnnnnnnnnnnnnnnnnnnnnnnnnnnnnnnnnnnnnnnnnnnnnnnnnnnnnnnnnnnnnnnnnnnnnnnnnnnnnnnnnnnnnnnnnnnnnnnnnnnnnnnnnnnnnnnnnnnnnnnnnnnnnnnnnnnnnnnnnnnnnnnnnnnnnnnnnnnnnnnnnnnnnnnnnnnnnnnnnnnnnnnnnnnnnnnnnnnnnnnnnnnnnnnnnnnnnnnnnnnnnnnnnnnnnnnnnnnnnnnnnnnnnnnnnnnnnnnnnnnnnnnnnnnnnnnnnnnnnnnnnnnnnnnnnnnnnnnnnnnnnnnnnnnnnnnnnnnnnnnnnnnnnnnnnnnnnnnnnnnnnnnnnnnnnnnnnnnnnnnnnnnnnnnnnnnnnnnnnnnnnnnnnnnnnnnnnnnnnnnnnnnnnnnnnnnnnnnnnnnnnnnnnnnnnnnnnnnnnnnnnnnnnnnnnnnnnnnnnnnnnnnnnnnnnnnnnnnnnnnnnnnnnnnnnnnnnnnnnnnnnnnnnnnnnnnnnnnnnnnnnnnnnnnnnnnnnnnnnnnnnnnnnnnnnnnnnnnnnnnnnnnnnnnnnnnnnnnnnnnnnnnnnnnnnnnnnnnnnnnnnnnnnnnnnnnnnnnnnnnnnnnnnnnnnnnnnnnnnnnnnnnnnnnnnnnnnnnnnnnnnnnnnnnnnnnnnnnnnnnnnnnnnnnnnnnnnnnnnnnnnnnnnnnnnnnnnnnnnnnnnnnnnnnnnnnnnnnnnnnnnnnnnnnnnnnnnnnnnnnnnnnnnnnnnnnnnnnnnnnnnnnnnnnnnnnnnnnnnnnnnnnnnnnnnnnnnnnnnnnnnnnnnnnnnnnnnnnnnnnnnnnnnnnnnnnnnnnnnnnnnnnnnnnnnnnnnnnnnnnnnnnnnnnnnnnnnnnnnnnnnnnnnnnnnnnnnnnnnnnnnnnnnnnnnnnnnnnnnnnnnnnnnnnnnnnnnnnnnnnnnnnnnnnnnnnnnnnnnnnnnnnnnnnnnnnnnnnnnnnnnnnnnnnnnnnnnnnnnnnnnnnnnnnnnnnnnnnnnnnnnnnnnnnnnnnnnnnnnnnnnnnnnnnnnnnnnnnnnnnnnnnnnnnnnnnnnnnnnnnnnnnnnnnnnnnnnnnnnnnnnnnnnnnnnnnnnnnnnnnnnnnnnnnnnnnnnnnnnnnnnnnnnnnnnnnnnnnnnnnnnnnnnnnnnnnnnnnnnnnnnnnnnnnnnnnnnnnnnnnnnnnnnnnnnnnnnnnnnnnnnnnnnnnnnnnnnnnnnnnnnnnnnnnnnnnnnnnnnnnnnnnnnnnnnnnnnnnnnnnnnnnnnnnnnnnnnnnnnnnnnnnnnnnnnnnnnnnnnnnnnnnnnnnnnnnnnnnnnnnnnnnnnnnnnnnnnnnnnnnnnnnnnnnnnnnnnnnnnnnnnnnnnnnnnnnnnnnnnnnnnnnnnnnnnnnnnnnnnnnnnnnnnnnnnnnnnnnnnnnnnnnnnnnnnnnnnnnnnnnnnnnnnnnnnnnnnnnnnnnnnnnnnnnnnnnnnnnnnnnnnnnnnnnnnnnnnnnnnnnnnnnnnnnnnnnnnnnnnnnnnnnnnnnnnnnnnnnnnnnnnnnnnnnnnnnnnnnnnnnnnnnnnnnnnnnnnnnnnnnnnnnnnnnnnnnnnnnnnnnnnnnnnnnnnnnnnnnnnnnnnnnnnnnnnnnnnnnnnnnnnnnnnnnnnnnnnnnnnnnnnnnnnnnnnnnnnnnnnnnnnnnnnnnnnnnnnnnnnnnnnnnnnnnnnnnnnnnnnnnnnnnnnnnnnnnnnnnnnnnnnnnnnnnnnnnnnnnnnnnnnnnnnnnnnnnnnnnnnnnnnnnnnnnnnnnnnnnnnnnnnnnnnnnnnnnnnnnnnnnnnnnnnnnnnnnnnnnnnnnnnnnnnnnnnnnnnnnnnnnnnnnnnnnnnnnnnnnnnnnnnnnnnnnnnnnnnnnnnnnnnnnnnnnnnnnnnnnnnnnnnnnnnnnnnnnnnnnnnnnnnnnnnnnnnnnnnnnnnnnnnnnnnnnnnnnnnnnnnnnnnnnnnnnnnnnnnnnnnnnnnnnnnnnnnnnnnnnnnnnnnnnnnnnnnnnnnnnnnnnnnnnnnnnnnnnnnnnnnnnnnnnnnnnnnnnnnnnnnnnnnnnnnnnnnnnnnnnnnnnnnnnnnnnnnnnnnnnnnnnnnnnnnnnnnnnnnnnnnnnnnnnnnnnnnnnnnnnnnnnnnnnnnnnnnnnnnnnnnnnnnnnnnnnnnnnnnnnnnnnnnnnnnnnnnnnnnnnnnnnnnnnnnnnnnnnnnnnnnnnnnnnnnnnnnnnnnnnnnnnnnnnnnnnnnnnnnnnnnnnnnnnnnnnnnnnnnnnnnnnnnnnnnnnnnnnnnnnnnnnnnnnnnnnnnnnnnnnnnnnnnnnnnnnnnnnnnnnnnnnnnnnnnnnnnnnnnnnnnnnnnnnnnnnnnnnnnnnnnnnnnnnnnnnnnnnnnnnnnnnnnnnnnnnnnnnnnnnnnnnnnnnnnnnnnnnnnnnnnnnnnnnnnnnnnnnnnnnnnnnnnnnnnnnnnnnnnnnnnnnnnnnnnnnnnnnnnnnnnnnnnnnnnnnnnnnnnnnnnnnnnnnnnnnnnnnnnnnnnnnnnnnnnnnnnnnnnnnnnnnnnnnnnnnnnnnnnnnnnnnnnnnnnnnnnnnnnnnnnnnnnnnnnnnnnnnnnnnnnnnnnnnnnnnnnnnnnnnnnnnnnnnnnnnnnnnnnnnnnnnnnnnnnnnnnnnnnnnnnnnnnnnnnnnnnnnnnnnnnnnnnnnnnnnnnnnnnnnnnnnnnnnnnnnnnnnnnnnnnnnnnnnnnnnnnnnnnnnnnnnnnnnnnnnnnnnnnnnnnnnnnnnnnnnnnnnnnnnnnnnnnnnnnnnnnnnnnnnnnnnnnnnnnnnnnnnnnnnnnnnnnnnnnnnnnnnnnnnnnnnnnnnnnnnnnnnnnnnnnnnnnnnnnnnnnnnnnnnnnnnnnnnnnnnnnnnnnnnnnnnnnnnnnnnnnnnnnnnnnnnnnnnnnnnnnnnnnnnnnnnnnnnnnnnnnnnnnnnnnnnnnnnnnnnnnnnnnnnnnnnnnnnnnnnnnnnnnnnnnnnnnnnnnnnnnnnnnnnnnnnnnnnnnnnnnnnnnnnnnnnnnnnnnnnnnnnnnnnnnnnnnnnnnnnnnnnnnnnnnnnnnnnnnnnnnnnnnnnnnnnnnnnnnnnnnnnnnnnnnnnnnnnnnnnnnnnnnnnnnnnnnnnnnnnnnnnnnnnnnnnnnnnnnnnnnnnnnnnnnnnnnnnnnnnnnnnnnnnnnnnnnnnnnnnnnnnnnnnnnnnnnnnnnnnnnnnnnnnnnnnnnnnnnnnnnnnnnnnnnnnnnnnnnnnnnnnnnnnnnnnnnnnnnnnnnnnnnnnnnnnnnnnnnnnnnnnnnnnnnnnnnnnnnnnnnnnnnnnnnnnnnnnnnnnnnnnnnnnnnnnnnnnnnnnnnnnnnnnnnnnnnnnnnnnnnnnnnnnnnnnnnnnnnnnnnnnnnnnnnnnnnnnnnnnnnnnnnnnnnnnnnnnnnnnnnnnnnnnnnnnnnnnnnnnnnnnnnnnnnnnnnnnnnnnnnnnnnnnnnnnnnnnnnnnnnnnnnnnnnnnnnnnnnnnnnnnnnnnnnnnnnnnnnnnnnnnnnnnnnnnnnnnnnnnnnnnnnnnnnnnnnnnnnnnnnnnnnnnnnnnnnnnnnnnnnnnnnnnnnnnnnnnnnnnnnnnnnnnnnnnnnnnnnnnnnnnnnnnnnnnnnnnnnnnnnnnnnnnnnnnnnnnnnnnnnnnnnnnnnnnnnnnnnnnnnnnnnnnnnnnnnnnnnnnnnnnnnnnnnnnnnnnnnnnnnnnnnnnnnnnnnnnnnnnnnnnnnnnnnnnnnnnnnnnnnnnnnnnnnnnnnnnnnnnnnnnnnnnnnnnnnnnnnnnnnnnnnnnnnnnnnnnnnnnnnnnnnnnnnnnnnnnnnnnnnnnnnnnnnnnnnnnnnnnnnnnnnnnnnnnnnnnnnnnnnnnnnnnnnnnnnnnnnnnnnnnnnnnnnnnnnnnnnnnnnnnnnnnnnnnnnnnnnnnnnnnnnnnnnnnnnnnnnnnnnnnnnnnnnnnnnnnnnnnnnnnnnnnnnnnnnnnnnnnnnnnnnnnnnnnnnnnnnnnnnnnnnnnnnnnnnnnnnnnnnnnnnnnnnnnnnnnnnnnnnnnnnnnnnnnnnnnnnnnnnnnnnnnnnnnnnnnnnnnnnnnnnnnnnnnnnnnnnnnnnnnnnnnnnnnnnnnnnnnnnnnnnnnnnnnnnnnnnnnnnnnnnnnnnnnnnnnnnnnnnnnnnnnnnnnnnnnnnnnnnnnnnnnnnnnnnnnnnnnnnnnnnnnnnnnnnnnnnnnnnnnnnnnnnnnnnnnnnnnnnnnnnnnnnnnnnnnnnnnnnnnnnnnnnnnnnnnnnnnnnnnnnnnnnnnnnnnnnnnnnnnnnnnnnnnnnnnnnnnnnnnnnnnnnnnnnnnnnnnnnnnnnnnnnnnnnnnnnnnnnnnnnnnnnnnnnnnnnnnnnnnnnnnnnnnnnnnnnnnnnnnnnnnnnnnnnnnnnnnnnnnnnnnnnnnnnnnnnnnnnnnnnnnnnnnnnnnnnnnnnnnnnnnnnnnnnnnnnnnnnnnnnnnnnnnnnnnnnnnnnnnnnnnnnnnnnnnnnnnnnnnnnnnnnnnnnnnnnnnnnnnnnnnnnnnnnnnnnnnnnnnnnnnnnnnnnnnnnnnnnnnnnnnnnnnnnnnnnnnnnnnnnnnnnnnnnnnnnnnnnnnnnnnnnnnnnnnnnnnnnnnnnnnnnnnnnnnnnnnnnnnnnnnnnnnnnnnnnnnnnnnnnnnnnnnnnnnnnnnnnnnnnnnnnnnnnnnnnnnnnnnnnnnnnnnnnnnnnnnnnnnnnnnnnnnnnnnnnnnnnnnnnnnnnnnnnnnnnnnnnnnnnnnnnnnnnnnnnnnnnnnnnnnnnnnnnnnnnnnnnnnnnnnnnnnnnnnnnnnnnnnnnnnnnnnnnnnnnnnnnnnnnnnnnnnnnnnnnnnnnnnnnnnnnnnnnnnnnnnnnnnnnnnnnnnnnnnnnnnnnnnnnnnnnnnnnnnnnnnnnnnnnnnnnnnnnnnnnnnnnnnnnnnnnnnnnnnnnnnnnnnnnnnnnnnnnnnnnnnnnnnnnnnnnnnnnnnnnnnnnnnnnnnnnnnnnnnnnnnnnnnnnnnnnnnnnnnnnnnnnnnnnnnnnnnnnnnnnnnnnnnnnnnnnnnnnnnnnnnnnnnnnnnnnnnnnnnnnnnnnnnnnnnnnnnnnnnnnnnnnnnnnnnnnnnnnnnnnnnnnnnnnnnnnnnnnnnnnnnnnnnnnnnnnnnnnnnnnnnnnnnnnnnnnnnnnnnnnnnnnnnnnnnnnnnnnnnnnnnnnnnnnnnnnnnnnnnnnnnnnnnnnnnnnnnnnnnnnnnnnnnnnnnnnnnnnnnnnnnnnnnnnnnnnnnnnnnnnnnnnnnnnnnnnnnnnnnnnnnnnnnnnnnnnnnnnnnnnnnnnnnnnnnnnnnnnnnnnnnnnnnnnnnnnnnnnnnnnnnnnnnnnnnnnnnnnnnnnnnnnnnnnnnnnnnnnnnnnnnnnnnnnnnnnnnnnnnnnnnnnnnnnnnnnnnnnnnnnnnnnnnnnnnnnnnnnnnnnnnnnnnnnnnnnnnnnnnnnnnnnnnnnnnnnnnnnnnnnnnnnnnnnnnnnnnnnnnnnnnnnnnnnnnnnnnnnnnnnnnnnnnnnnnnnnnnnnnnnnnnnnnnnnnnnnnnnnnnnnnnnnnnnnnnnnnnnnnnnnnnnnnnnnnnnnnnnnnnnnnnnnnnnnnnnnnnnnnnnnnnnnnnnnnnnnnnnnnnnnnnnnnnnnnnnnnnnnnnnnnnnnnnnnnnnnnnnnnnnnnnnnnnnnnnnnnnnnnnnnnnnnnnnnnnnnnnnnnnnnnnnnnnnnnnnnnnnnnnnnnnnnnnnnnnnnnnnnnnnnnnnnnnnnnnnnnnnnnnnnnnnnnnnnnnnnnnnnnnnnnnnnnnnnnnnnnnnnnnnnnnnnnnnnnnnnnnnnnnnnnnnnnnnnnnnnnnnnnnnnnnnnnnnnnnnnnnnnnnnnnnnnnnnnnnnnnnnnnnnnnnnnnnnnnnnnnnnnnnnnnnnnnnnnnnnnnnnnnnnnnnnnnnnnnnnnnnnnnnnnnnnnnnnnnnnnnnnnnnnnnnnnnnnnnnnnnnnnnnnnnnnnnnnnnnnnnnnnnnnnnnnnnnnnnnnnnnnnnnnnnnnnnnnnnnnnnnnnnnnnnnnnnnnnnnnnnnnnnnnnnnnnnnnnnnnnnnnnnnnnnnnnnnnnnnnnnnnnnnnnnnnnnnnnnnnnnnnnnnnnnnnnnnnnnnnnnnnnnnnnnnnnnnnnnnnnnnnnnnnnnnnnnnnnnnnnnnnnnnnnnnnnnnnnnnnnnnnnnnnnnnnnnnnnnnnnnnnnnnnnnnnnnnnnnnnnnnnnnnnnnnnnnnnnnnnnnnnnnnnnnnnnnnnnnnnnnnnnnnnnnnnnnnnnnnnnnnnnnnnnnnnnnnnnnnnnnnnnnnnnnnnnnnnnnnnnnnnnnnnnnnnnnnnnnnnnnnnnnnnnnnnnnnnnnnnnnnnnnnnnnnnnnnnnnnnnnnnnnnnnnnnnnnnnnnnnnnnnnnnnnnnnnnnnnnnnnnnnnnnnnnnnnnnnnnnnnnnnnnnnnnnnnnnnnnnnnnnnnnnnnnnnnnnnnnnnnnnnnnnnnnnnnnnnnnnnnnnnnnnnnnnnnnnnnnnnnnnnnnnnnnnnnnnnnnnnnnnnnnnnnnnnnnnnnnnnnnnnnnnnnnnnnnnnnnnnnnnnnnnnnnnnnnnnnnnnnnnnnnnnnnnnnnnnnnnnnnnnnnnnnnnnnnnnnnnnnnnnnnnnnnnnnnnnnnnnnnnnnnnnnnnnnnnnnnnnnnnnnnnnnnnnnnnnnnnnnnnnnnnnnnnnnnnnnnnnnnnnnnnnnnnnnnnnnnnnnnnnnnnnnnnnnnnnnnnnnnnnnnnnnnnnnnnnnnnnnnnnnnnnnnnnnnnnnnnnnnnnnnnnnnnnnnnnnnnnnnnnnnnnnnnnnnnnnnnnnnnnnnnnnnnnnnnnnnnnnnnnnnnnnnnnnnnnnnnnnnnnnnnnnnnnnnnnnnnnnnnnnnnnnnnnnnnnnnnnnnnnnnnnnnnnnnnnnnnnnnnnnnnnnnnnnnnnnnnnnnnnnnnnnnnnnnnnnnnnnnnnnnnnnnnnnnnnnnnnnnnnnnnnnnnnnnnnnnnnnnnnnnnnnnnnnnnnnnnnnnnnnnnnnnnnnnnnnnnnnnnnnnnnnnnnnnnnnnnnnnnnnnnnnnnnnnnnnnnnnnnnnnnnnnnnnnnnnnnnnnnnnnnnnnnnnnnnnnnnnnnnnnnnnnnnnnnnnnnnnnnnnnnnnnnnnnnnnnnnnnnnnnnnnnnnnnnnnnnnnnnnnnnnnnnnnnnnnnnnnnnnnnnnnnnnnnnnnnnnnnnnnnnnnnnnnnnnnnnnnnnnnnnnnnnnnnnnnnnnnnnnnnnnnnnnnnnnnnnnnnnnnnnnnnnnnnnnnnnnnnnnnnnnnnnnnnnnnnnnnnnnnnnnnnnnnnnnnnnnnnnnnnnnnnnnnnnnnnnnnnnnnnnnnnnnnnnnnnnnnnnnnnnnnnnnnnnnnnnnnnnnnnnnnnnnnnnnnnnnnnnnnnnnnnnnnnnnnnnnnnnnnnnnnnnnnnnnnnnnnnnnnnnnnnnnnnnnnnnnnnnnnnnnnnnnnnnnnnnnnnnnnnnnnnnnnnnnnnnnnnnnnnnnnnnnnnnnnnnnnnnnnnnnnnnnnnnnnnnnnnnnnnnnnnnnnnnnnnnnnnnnnnnnnnnnnnnnnnnnnnnnnnnnnnnnnnnnnnnnnnnnnnnnnnnnnnnnnnnnnnnnnnnnnnnnnnnnnnnnnnnnnnnnnnnnnnnnnnnnnnnnnnnnnnnnnnnnnnnnnnnnnnnnnnnnnnnnnnnnnnnnnnnnnnnnnnnnnnnnnnnnnnnnnnnnnnnnnnnnnnnnnnnnnnnnnnnnnnnnnnnnnnnnnnnnnnnnnnnnnnnnnnnnnnnnnnnnnnnnnnnnnnnnnnnnnnnnnnnnnnnnnnnnnnnnnnnnnnnnnnnnnnnnnnnnnnnnnnnnnnnnnnnnnnnnnnnnnnnnnnnnnnnnnnnnnnnnnnnnnnnnnnnnnnnnnnnnnnnnnnnnnnnnnnnnnnnnnnnnnnnnnnnnnnnnnnnnnnnnnnnnnnnnnnnnnnnnnnnnnnnnnnnnnnnnnnnnnnnnnnnnnnnnnnnnnnnnnnnnnnnnnnnnnnnnnnnnnnnnnnnnnnnnnnnnnnnnnnnnnnnnnnnnnnnnnnnnnnnnnnnnnnnnnnnnnnnnnnnnnnnnnnnnnnnnnnnnnnnnnnnnnnnnnnnnnnnnnnnnnnnnnnnnnnnnnnnnnnnnnnnnnnnnnnnnnnnnnnnnnnnnnnnnnnnnnnnnnnnnnnnnnnnnnnnnnnnnnnnnnnnnnnnnnnnnnnnnnnnnnnnnnnnnnnnnnnnnnnnnnnnnnnnnnnnnnnnnnnnnnnnnnnnnnnnnnnnnnnnnnnnnnnnnnnnnnnnnnnnnnnnnnnnnnnnnnnnnnnnnnnnnnnnnnnnnnnnnnnnnnnnnnnnnnnnnnnnnnnnnnnnnnnnnnnnnnnnnnnnnnnnnnnnnnnnnnnnnnnnnnnnnnnnnnnnnnnnnnnnnnnnnnnnnnnnnnnnnnnnnnnnnnnnnnnnnnnnnnnnnnnnnnnnnnnnnnnnnnnnnnnnnnnnnnnnnnnnnnnnnnnnnnnnnnnnnnnnnnnnnnnnnnnnnnnnnnnnnnnnnnnnnnnnnnnnnnnnnnnnnnnnnnnnnnnnnnnnnnnnnnnnnnnnnnnnnnnnnnnnnnnnnnnnnnnnnnnnnnnnnnnnnnnnnnnnnnnnnnnnnnnnnnnnnnnnnnnnnnnnnnnnnnnnnnnnnnnnnnnnnnnnnnnnnnnnnnnnnnnnnnnnnnnnnnnnnnnnnnnnnnnnnnnnnnnnnnnnnnnnnnnnnnnnnnnnnnnnnnnnnnnnnnnnnnnnnnnnnnnnnnnnnnnnnnnnnnnnnnnnnnnnnnnnnnnnnnnnnnnnnnnnnnnnnnnnnnnnnnnnnnnnnnnnnnnnnnnnnnnnnnnnnnnnnnnnnnnnnnnnnnnnnnnnnnnnnnnnnnnnnnnnnnnnnnnnnnnnnnnnnnnnnnnnnnnnnnnnnnnnnnnnnnnnnnnnnnnnnnnnnnnnnnnnnnnnnnnnnnnnnnnnnnnnnnnnnnnnnnnnnnnnnnnnnnnnnnnnnnnnnnnnnnnnnnnnnnnnnnnnnnnnnnnnnnnnnnnnnnnnnnnnnnnnnnnnnnnnnnnnnnnnnnnnnnnnnnnnnnnnnnnnnnnnnnnnnnnnnnnnnnnnnnnnnnnnnnnnnnnnnnnnnnnnnnnnnnnnnnnnnnnnnnnnnnnnnnnnnnnnnnnnnnnnnnnnnnnnnnnnnnnnnnnnnnnnnnnnnnnnnnnnnnnnnnnnnnnnnnnnnnnnnnnnnnnnnnnnnnnnnnnnnnnnnnnnnnnnnnnnnnnnnnnnnnnnnnnnnnnnnnnnnnnnnnnnnnnnnnnnnnnnnnnnnnnnnnnnnnnnnnnnnnnnnnnnnnnnnnnnnnnnnnnnnnnnnnnnnnnnnnnnnnnnnnnnnnnnnnnnnnnnnnnnnnnnnnnnnnnnnnnnnnnnnnnnnnnnnnnnnnnnnnnnnnnnnnnnnnnnnnnnnnnnnnnnnnnnnnnnnnnnnnnnnnnnnnnnnnnnnnnnnnnnnnnnnnnnnnnnnnnnnnnnnnnnnnnnnnnnnnnnnnnnnnnnnnnnnnnnnnnnnnnnnnnnnnnnnnnnnnnnnnnnnnnnnnnnnnnnnnnnnnnnnnnnnnnnnnnnnnnnnnnnnnnnnnnnnnnnnnnnnnnnnnnnnnnnnnnnnnnnnnnnnnnnnnnnnnnnnnnnnnnnnnnnnnnnnnnnnnnnnnnnnnnnnnnnnnnnnnnnnnnnnnnnnnnnnnnnnnnnnnnnnnnnnnnnnnnnnnnnnnnnnnnnnnnnnnnnnnnnnnnnnnnnnnnnnnnnnnnnnnnnnnnnnnnnnnnnnnnnnnnnnnnnnnnnnnnnnnnnnnnnnnnnnnnnnnnnnnnnnnnnnnnnnnnnnnnnnnnnnnnnnnnnnnnnnnnnnnnnnnnnnnnnnnnnnnnnnnnnnnnnnnnnnnnnnnnnnnnnnnnnnnnnnnnnnnnnnnnnnnnnnnnnnnnnnnnnnnnnnnnnnnnnnnnnnnnnnnnnnnnnnnnnnnnnnnnnnnnnnnnnnnnnnnnnnnnnnnnnnnnnnnnnnnnnnnnnnnnnnnnnnnnnnnnnnnnnnnnnnnnnnnnnnnnnnnnnnnnnnnnnnnnnnnnnnnnnnnnnnnnnnnnnnnnnnnnnnnnnnnnnnnnnnnnnnnnnnnnnnnnnnnnnnnnnnnnnnnnnnnnnnnnnnnnnnnnnnnnnnnnnnnnnnnnnnnnnnnnnnnnnnnnnnnnnnnnnnnnnnnnnnnnnnnnnnnnnnnnnnnnnnnnnnnnnnnnnnnnnnnnnnnnnnnnnnnnnnnnnnnnnnnnnnnnnnnnnnnnnnnnnnnnnnnnnnnnnnnnnnnnnnnnnnnnnnnnnnnnnnnnnnnnnnnnnnnnnnnnnnnnnnnnnnnnnnnnnnnnnnnnnnnnnnnnnnnnnnnnnnnnnnnnnnnnnnnnnnnnnnnnnnnnnnnnnnnnnnnnnnnnnnnnnnnnnnnnnnnnnnnnnnnnnnnnnnnnnnnnnnnnnnnnnnnnnnnnnnnnnnnnnnnnnnnnnnnnnnnnnnnnnnnnnnnnnnnnnnnnnnnnnnnnnnnnnnnnnnnnnnnnnnnnnnnnnnnnnnnnnnnnnnnnnnnnnnnnnnnnnnnnnnnnnnnnnnnnnnnnnnnnnnnnnnnnnnnnnnnnnnnnnnnnnnnnnnnnnnnnnnnnnnnnnnnnnnnnnnnnnnnnnnnnnnnnnnnnnnnnnnnnnnnnnnnnnnnnnnnnnnnnnnnnnnnnnnnnnnnnnnnnnnnnnnnnnnnnnnnnnnnnnnnnnnnnnnnnnnnnnnnnnnnnnnnnnnnnnnnnnnnnnnnnnnnnnnnnnnnnnnnnnnnnnnnnnnnnnnnnnnnnnnnnnnnnnnnnnnnnnnnnnnnnnnnnnnnnnnnnnnnnnnnnnnnnnnnnnnnnnnnnnnnnnnnnnnnnnnnnnnnnnnnnnnnnnnnnnnnnnnnnnnnnnnnnnnnnnnnnnnnnnnnnnnnnnnnnnnnnnnnnnnnnnnnnnnnnnnnnnnnnnnnnnnnnnnnnnnnnnnnnnnnnnnnnnnnnnnnnnnnnnnnnnnnnnnnnnnnnnnnnnnnnnnnnnnnnnnnnnnnnnnnnnnnnnnnnnnnnnnnnnnnnnnnnnnnnnnnnnnnnnnnnnnnnnnnnnnnnnnnnnnnnnnnnnnnnnnnnnnnnnnnnnnnnnnnnnnnnnnnnnnnnnnnnnnnnnnnnnnnnnnnnnnnnnnnnnnnnnnnnnnnnnnnnnnnnnnnnnnnnnnnnnnnnnnnnnnnnnnnnnnnnnnnnnnnnnnnnnnnnnnnnnnnnnnnnnnnnnnnnnnnnnnnnnnnnnnnnnnnnnnnnnnnnnnnnnnnnnnnnnnnnnnnnnnnnnnnnnnnnnnnnnnnnnnnnnnnnnnnnnnnnnnnnnnnnnnnnnnnnnnnnnnnnnnnnnnnnnnnnnnnnnnnnnnnnnnnnnnnnnnnnnnnnnnnnnnnnnnnnnnnnnnnnnnnnnnnnnnnnnnnnnnnnnnnnnnnnnnnnnnnnnnnnnnnnnnnnnnnnnnnnnnnnnnnnnnnnnnnnnnnnnnnnnnnnnnnnnnnnnnnnnnnnnnnnnnnnnnnnnnnnnnnnnnnnnnnnnnnnnnnnnnnnnnnnnnnnnnnnnnnnnnnnnnnnnnnnnnnnnnnnnnnnnnnnnnnnnnnnnnnnnnnnnnnnnnnnnnnnnnnnnnnnnnnnnnnnnnnnnnnnnnnnnnnnnnnnnnnnnnnnnnnnnnnnnnnnnnnnnnnnnnnnnnnnnnnnnnnnnnnnnnnnnnnnnnnnnnnnnnnnnnnnnnnnnnnnnnnnnnnnnnnnnnnnnnnnnnnnnnnnnnnnnnnnnnnnnnnnnnnnnnnnnnnnnnnnnnnnnnnnnnnnnnnnnnnnnnnnnnnnnnnnnnnnnnnnnnnnnnnnnnnnnnnnnnnnnnnnnnnnnnnnnnnnnnnnnnnnnnnnnnnnnnnnnnnnnnnnnnnnnnnnnnnnnnnnnnnnnnnnnnnnnnnnnnnnnnnnnnnnnnnnnnnnnnnnnnnnnnnnnnnnnnnnnnnnnnnnnnnnnnnnnnnnnnnnnnnnnnnnnnnnnnnnnnnnnnnnnnnnnnnnnnnnnnnnnnnnnnnnnnnnnnnnnnnnnnnnnnnnnnnnnnnnnnnnnnnnnnnnnnnnnnnnnnnnnnnnnnnnnnnnnnnnnnnnnnnnnnnnnnnnnnnnnnnnnnnnnnnnnnnnnnnnnnnnnnnnnnnnnnnnnnnnnnnnnnnnnnnnnnnnnnnnnnnnnnnnnnnnnnnnnnnnnnnnnnnnnnnnnnnnnnnnnnnnnnnnnnnnnnnnnnnnnnnnnnnnnnnnnnnnnnnnnnnnnnnnnnnnnnnnnnnnnnnnnnnnnnnnnnnnnnnnnnnnnnnnnnnnnnnnnnnnnnnnnnnnnnnnnnnnnnnnnnnnnnnnnnnnnnnnnnnnnnnnnnnnnnnnnnnnnnnnnnnnnnnnnnnnnnnnnnnnnnnnnnnnnnnnnnnnnnnnnnnnnnnnnnnnnnnnnnnnnnnnnnnnnnnnnnnnnnnnnnnnnnnnnnnnnnnnnnnnnnnnnnnnnnnnnnnnnnnnnnnnnnnnnnnnnnnnnnnnnnnnnnnnnnnnnnnnnnnnnnnnnnnnnnnnnnnnnnnnnnnnnnnnnnnnnnnnnnnnnnnnnnnnnnnnnnnnnnnnnnnnnnnnnnnnnnnnnnnnnnnnnnnnnnnnnnnnnnnnnnnnnnnnnnnnnnnnnnnnnnnnnnnnnnnnnnnnnnnnnnnnnnnnnnnnnnnnnnnnnnnnnnnnnnnnnnnnnnnnnnnnnnnnnnnnnnnnnnnnnnnnnnnnnnnnnnnnnnnnnnnnnnnnnnnnnnnnnnnnnnnnnnnnnnnnnnnnnnnnnnnnnnnnnnnnnnnnnnnnnnnnnnnnnnnnnnnnnnnnnnnnnnnnnnnnnnnnnnnnnnnnnnnnnnnnnnnnnnnnnnnnnnnnnnnnnnnnnnnnnnnnnnnnnnnnnnnnnnnnnnnnnnnnnnnnnnnnnnnnnnnnnnnnnnnnnnnnnnnnnnnnnnnnnnnnnnnnnnnnnnnnnnnnnnnnnnnnnnnnnnnnnnnnnnnnnnnnnnnnnnnnnnnnnnnnnnnnnnnnnnnnnnnnnnnnnnnnnnnnnnnnnnnnnnnnnnnnnnnnnnnnnnnnnnnnnnnnnnnnnnnnnnnnnnnnnnnnnnnnnnnnnnnnnnnnnnnnnnnnnnnnnnnnnnnnnnnnnnnnnnnnnnnnnnnnnnnnnnnnnnnnnnnnnnnnnnnnnnnnnnnnnnnnnnnnnnnnnnnnnnnnnnnnnnnnnnnnnnnnnnnnnnnnnnnnnnnnnnnnnnnnnnnnnnnnnnnnnnnnnnnnnnnnnnnnnnnnnnnnnnnnnnnnnnnnnnnnnnnnnnnnnnnnnnnnnnnnnnnnnnnnnnnnnnnnnnnnnnnnnnnnnnnnnnnnnnnnnnnnnnnnnnnnnnnnnnnnnnnnnnnnnnnnnnnnnnnnnnnnnnnnnnnnnnnnnnnnnnnnnnnnnnnnnnnnnnnnnnnnnnnnnnnnnnnnnnnnnnnnnnnnnnnnnnnnnnnnnnnnnnnnnnnnnnnnnnnnnnnnnnnnnnnnnnnnnnnnnnnnnnnnnnnnnnnnnnnnnnnnnnnnnnnnnnnnnnnnnnnnnnnnnnnnnnnnnnnnnnnnnnnnnnnnnnnnnnnnnnnnnnnnnnnnnnnnnnnnnnnnnnnnnnnnnnnnnnnnnnnnnnnnnnnnnnnnnnnnnnnnnnnnnnnnnnnnnnnnnnnnnnnnnnnnnnnnnnnnnnnnnnnnnnnnnnnnnnnnnnnnnnnnnnnnnnnnnnnnnnnnnnnnnnnnnnnnnnnnnnnnnnnnnnnnnnnnnnnnnnnnnnnnnnnnnnnnnnnnnnnnnnnnnnnnnnnnnnnnnnnnnnnnnnnnnnnnnnnnnnnnnnnnnnnnnnnnnnnnnnnnnnnnnnnnnnnnnnnnnnnnnnnnnnnnnnnnnnnnnnnnnnnnnnnnnnnnnnnnnnnnnnnnnnnnnnnnnnnnnnnnnnnnnnnnnnnnnnnnnnnnnnnnnnnnnnnnnnnnnnnnnnnnnnnnnnnnnnnnnnnnnnnnnnnnnnnnnnnnnnnnnnnnnnnnnnnnnnnnnnnnnnnnnnnnnnnnnnnnnnnnnnnnnnnnnnnnnnnnnnnnnnnnnnnnnnnnnnnnnnnnnnnnnnnnnnnnnnnnnnnnnnnnnnnnnnnnnnnnnnnnnnnnnnnnnnnnnnnnnnnnnnnnnnnnnnnnnnnnnnnnnnnnnnnnnnnnnnnnnnnnnnnnnnnnnnnnnnnnnnnnnnnnnnnnnnnnnnnnnnnnnnnnnnnnnnnnnnnnnnnnnnnnnnnnnnnnnnnnnnnnnnnnnnnnnnnnnnnnnnnnnnnnnnnnnnnnnnnnnnnnnnnnnnnnnnnnnnnnnnnnnnnnnnnnnnnnnnnnnnnnnnnnnnnnnnnnnnnnnnnnnnnnnnnnnnnnnnnnnnnnnnnnnnnnnnnnnnnnnnnnnnnnnnnnnnnnnnnnnnnnnnnnnnnnnnnnnnnnnnnnnnnnnnnnnnnnnnnnnnnnnnnnnnnnnnnnnnnnnnnnnnnnnnnnnnnnnnnnnnnnnnnnnnnnnnnnnnnnnnnnnnnnnnnnnnnnnnnnnnnnnnnnnnnnnnnnnnnnnnnnnnnnnnnnnnnnnnnnnnnnnnnnnnnnnnnnnnnnnnnnnnnnnnnnnnnnnnnnnnnnnnnnnnnnnnnnnnnnnnnnnnnnnnnnnnnnnnnnnnnnnnnnnnnnnnnnnnnnnnnnnnnnnnnnnnnnnnnnnnnnnnnnnnnnnnnnnnnnnnnnnnnnnnnnnnnnnnnnnnnnnnnnnnnnnnnnnnnnnnnnnnnnnnnnnnnnnnnnnnnnnnnnnnnnnnnnnnnnnnnnnnnnnnnnnnnnnnnnnnnnnnnnnnnnnnnnnnnnnnnnnnnnnnnnnnnnnnnnnnnnnnnnnnnnnnnnnnnnnnnnnnnnnnnnnnnnnnnnnnnnnnnnnnnnnnnnnnnnnnnnnnnnnnnnnnnnnnnnnnnnnnnnnnnnnnnnnnnnnnnnnnnnnnnnnnnnnnnnnnnnnnnnnnnnnnnnnnnnnnnnnnnnnnnnnnnnnnnnnnnnnnnnnnnnnnnnnnnnnnnnnnnnnnnnnnnnnnnnnnnnnnnnnnnnnnnnnnnnnnnnnnnnnnnnnnnnnnnnnnnnnnnnnnnnnnnnnnnnnnnnnnnnnnnnnnnnnnnnnnnnnnnnnnnnnnnnnnnnnnnnnnnnnnnnnnnnnnnnnnnnnnnnnnnnnnnnnnnnnnnnnnnnnnnnnnnnnnnnnnnnnnnnnnnnnnnnnnnnnnnnnnnnnnnnnnnnnnnnnnnnnnnnnnnnnnnnnnnnnnnnnnnnnnnnnnnnnnnnnnnnnnnnnnnnnnnnnnnnnnnnnnnnnnnnnnnnnnnnnnnnnnnnnnnnnnnnnnnnnnnnnnnnnnnnnnnnnnnnnnnnnnnnnnnnnnnnnnnnnnnnnnnnnnnnnnnnnnnnnnnnnnnnnnnnnnnnnnnnnnnnnnnnnnnnnnnnnnnnnnnnnnnnnnnnnnnnnnnnnnnnnnnnnnnnnnnnnnnnnnnnnnnnnnnnnnnnnnnnnnnnnnnnnnnnnnnnnnnnnnnnnnnnnnnnnnnnnnnnnnnnnnnnnnnnnnnnnnnnnnnnnnnnnnnnnnnnnnnnnnnnnnnnnnnnnnnnnnnnnnnnnnnnnnnnnnnnnnnnnnnnnnnnnnnnnnnnnnnnnnnnnnnnnnnnnnnnnnnnnnnnnnnnnnnnnnnnnnnnnnnnnnnnnnnnnnnnnnnnnnnnnnnnnnnnnnnnnnnnnnnnnnnnnnnnnnnnnnnnnnnnnnnnnnnnnnnnnnnnnnnnnnnnnnnnnnnnnnnnnnnnnnnnnnnnnnnnnnnnnnnnnnnnnnnnnnnnnnnnnnnnnnnnnnnnnnnnnnnnnnnnnnnnnnnnnnnnnnnnnnnnnnnnnnnnnnnnnnnnnnnnnnnnnnnnnnnnnnnnnnnnnnnnnnnnnnnnnnnnnnnnnnnnnnnnnnnnnnnnnnnnnnnnnnnnnnnnnnnnnnnnnnnnnnnnnnnnnnnnnnnnnnnnnnnnnnnnnnnnnnnnnnnnnnnnnnnnnnnnnnnnnnnnnnnnnnnnnnnnnnnnnnnnnnnnnnnnnnnnnnnnnnnnnnnnnnnnnnnnnnnnnnnnnnnnnnnnnnnnnnnnnnnnnnnnnnnnnnnnnnnnnnnnnnnnnnnnnnnnnnnnnnnnnnnnnnnnnnnnnnnnnnnnnnnnnnnnnnnnnnnnnnnnnnnnnnnnnnnnnnnnnnnnnnnnnnnnnnnnnnnnnnnnnnnnnnnnnnnnnnnnnnnnnnnnnnnnnnnnnnnnnnnnnnnnnnnnnnnnnnnnnnnnnnnnnnnnnnnnnnnnnnnnnnnnnnnnnnnnnnnnnnnnnnnnnnnnnnnnnnnnnnnnnnnnnnnnnnnnnnnnnnnnnnnnnnnnnnnnnnnnnnnnnnnnnnnnnnnnnnnnnnnnnnnnnnnnnnnnnnnnnnnnnnnnnnnnnnnnnnnnnnnnnnnnnnnnnnnnnnnnnnnnnnnnnnnnnnnnnnnnnnnnnnnnnnnnnnnnnnnnnnnnnnnnnnnnnnnnnnnnnnnnnnnnnnnnnnnnnnnnnnnnnnnnnnnnnnnnnnnnnnnnnnnnnnnnnnnnnnnnnnnnnnnnnnnnnnnnnnnnnnnnnnnnnnnnnnnnnnnnnnnnnnnnnnnnnnnnnnnnnnnnnnnnnnnnnnnnnnnnnnnnnnnnnnnnnnnnnnnnnnnnnnnnnnnnnnnnnnnnnnnnnnnnnnnnnnnnnnnnnnnnnnnnnnnnnnnnnnnnnnnnnnnnnnnnnnnnnnnnnnnnnnnnnnnnnnnnnnnnnnnnnnnnnnnnnnnnnnnnnnnnnnnnnnnnnnnnnnnnnnnnnnnnnnnnnnnnnnnnnnnnnnnnnnnnnnnnnnnnnnnnnnnnnnnnnnnnnnnnnnnnnnnnnnnnnnnnnnnnnnnnnnnnnnnnnnnnnnnnnnnnnnnnnnnnnnnnnnnnnnnnnnnnnnnnnnnnnnnnnnnnnnnnnnnnnnnnnnnnnnnnnnnnnnnnnnnnnnnnnnnnnnnnnnnnnnnnnnnnnnnnnnnnnnnnnnnnnnnnnnnnnnnnnnnnnnnnnnnnnnnnnnnnnnnnnnnnnnnnnnnnnnnnnnnnnnnnnnnnnnnnnnnnnnnnnnnnnnnnnnnnnnnnnnnnnnnnnnnnnnnnnnnnnnnnnnnnnnnnnnnnnnnnnnnnnnnnnnnnnnnnnnnnnnnnnnnnnnnnnnnnnnnnnnnnnnnnnnnnnnnnnnnnnnnnnnnnnnnnnnnnnnnnnnnnnnnnnnnnnnnnnnnnnnnnnnnnnnnnnnnnnnnnnnnnnnnnnnnnnnnnnnnnnnnnnnnnnnnnnnnnnnnnnnnnnnnnnnnnnnnnnnnnnnnnnnnnnnnnnnnnnnnnnnnnnnnnnnnnnnnnnnnnnnnnnnnnnnnnnnnnnnnnnnnnnnnnnnnnnnnnnnnnnnnnnnnnnnnnnnnnnnnnnnnnnnnnnnnnnnnnnnnnnnnnnnnnnnnnnnnnnnnnnnnnnnnnnnnnnnnnnnnnnnnnnnnnnnnnnnnnnnnnnnnnnnnnnnnnnnnnnnnnnnnnnnnnnnnnnnnnnnnnnnnnnnnnnnnnnnnnnnnnnnnnnnnnnnnnnnnnnnnnnnnnnnnnnnnnnnnnnnnnnnnnnnnnnnnnnnnnnnnnnnnnnnnnnnnnnnnnnnnnnnnnnnnnnnnnnnnnnnnnnnnnnnnnnnnnnnnnnnnnnnnnnnnnnnnnnnnnnnnnnnnnnnnnnnnnnnnnnnnnnnnnnnnnnnnnnnnnnnnnnnnnnnnnnnnnnnnnnnnnnnnnnnnnnnnnnnnnnnnnnnnnnnnnnnnnnnnnnnnnnnnnnnnnnnnnnnnnnnnnnnnnnnnnnnnnnnnnnnnnnnnnnnnnnnnnnnnnnnnnnnnnnnnnnnnnnnnnnnnnnnnnnnnnnnnnnnnnnnnnnnnnnnnnnnnnnnnnnnnnnnnnnnnnnnnnnnnnnnnnnnnnnnnnnnnnnnnnnnnnnnnnnnnnnnnnnnnnnnnnnnnnnnnnnnnnnnnnnnnnnnnnnnnnnnnnnnnnnnnnnnnnnnnnnnnnnnnnnnnnnnnnnnnnnnnnnnnnnnnnnnnnnnnnnnnnnnnnnnnnnnnnnnnnnnnnnnnnnnnnnnnnnnnnnnnnnnnnnnnnnnnnnnnnnnnnnnnnnnnnnnnnnnnnnnnnnnnnnnnnnnnnnnnnnnnnnnnnnnnnnnnnnnnnnnnnnnnnnnnnnnnnnnnnnnnnnnnnnnnnnnnnnnnnnnnnnnnnnnnnnnnnnnnnnnnnnnnnnnnnnnnnnnnnnnnnnnnnnnnnnnnnnnnnnnnnnnnnnnnnnnnnnnnnnnnnnnnnnnnnnnnnnnnnnnnnnnnnnnnnnnnnnnnnnnnnnnnnnnnnnnnnnnnnnnnnnnnnnnnnnnnnnnnnnnnnnnnnnnnnnnnnnnnnnnnnnnnnnnnnnnnnnnnnnnnnnnnnnnnnnnnnnnnnnnnnnnnnnnnnnnnnnnnnnnnnnnnnnnnnnnnnnnnnnnnnnnnnnnnnnnnnnnnnnnnnnnnnnnnnnnnnnnnnnnnnnnnnnnnnnnnnnnnnnnnnnnnnnnnnnnnnnnnnnnnnnnnnnnnnnnnnnnnnnnnnnnnnnnnnnnnnnnnnnnnnnnnnnnnnnnnnnnnnnnnnnnnnnnnnnnnnnnnnnnnnnnnnnnnnnnnnnnnnnnnnnnnnnnnnnnnnnnnnnnnnnnnnnnnnnnnnnnnnnnnnnnnnnnnnnnnnnnnnnnnnnnnnnnnnnnnnnnnnnnnnnnnnnnnnnnnnnnnnnnnnnnnnnnnnnnnnnnnnnnnnnnnnnnnnnnnnnnnnnnnnnnnnnnnnnnnnnnnnnnnnnnnnnnnnnnnnnnnnnnnnnnnnnnnnnnnnnnnnnnnnnnnnnnnnnnnnnnnnnnnnnnnnnnnnnnnnnnnnnnnnnnnnnnnnnnnnnnnnnnnnnnnnnnnnnnnnnnnnnnnnnnnnnnnnnnnnnnnnnnnnnnnnnnnnnnnnnnnnnnnnnnnnnnnnnnnnnnnnnnnnnnnnnnnnnnnnnnnnnnnnnnnnnnnnnnnnnnnnnnnnnnnnnnnnnnnnnnnnnnnnnnnnnnnnnnnnnnnnnnnnnnnnnnnnnnnnnnnnnnnnnnnnnnnnnnnnnnnnnnnnnnnnnnnnnnnnnnnnnnnnnnnnnnnnnnnnnnnnnnnnnnnnnnnnnnnnnnnnnnnnnnnnnnnnnnnnnnnnnnnnnnnnnnnnnnnnnnnnnnnnnnnnnnnnnnnnnnnnnnnnnnnnnnnnnnnnnnnnnnnnnnnnnnnnnnnnnnnnnnnnnnnnnnnnnnnnnnnnnnnnnnnnnnnnnnnnnnnnnnnnnnnnnnnnnnnnnnnnnnnnnnnnnnnnnnnnnnnnnnnnnnnnnnnnnnnnnnnnnnnnnnnnnnnnnnnnnnnnnnnnnnnnnnnnnnnnnnnnnnnnnnnnnnnnnnnnnnnnnnnnnnnnnnnnnnnnnnnnnnnnnnnnnnnnnnnnnnnnnnnnnnnnnnnnnnnnnnnnnnnnnnnnnnnnnnnnnnnnnnnnnnnnnnnnnnnnnnnnnnnnnnnnnnnnnnnnnnnnnnnnnnnnnnnnnnnnnnnnnnnnnnnnnnnnnnnnnnnnnnnnnnnnnnnnnnnnnnnnnnnnnnnnnnnnnnnnnnnnnnnnnnnnnnnnnnnnnnnnnnnnnnnnnnnnnnnnnnnnnnnnnnnnnnnnnnnnnnnnnnnnnnnnnnnnnnnnnnnnnnnnnnnnnnnnnnnnnnnnnnnnnnnnnnnnnnnnnnnnnnnnnnnnnnnnnnnnnnnnnnnnnnnnnnnnnnnnnnnnnnnnnnnnnnnnnnnnnnnnnnnnnnnnnnnnnnnnnnnnnnnnnnnnnnnnnnnnnnnnnnnnnnnnnnnnnnnnnnnnnnnnnnnnnnnnnnnnnnnnnnnnnnnnnnnnnnnnnnnnnnnnnnnnnnnnnnnnnnnnnnnnnnnnnnnnnnnnnnnnnnnnnnnnnnnnnnnnnnnnnnnnnnnnnnnnnnnnnnnnnnnnnnnnnnnnnnnnnnnnnnnnnnnnnnnnnnnnnnnnnnnnnnnnnnnnnnnnnnnnnnnnnnnnnnnnnnnnnnnnnnnnnnnnnnnnnnnnnnnnnnnnnnnnnnnnnnnnnnnnnnnnnnnnnnnnnnnnnnnnnnnnnnnnnnnnnnnnnnnnnnnnnnnnnnnnnnnnnnnnnnnnnnnnnnnnnnnnnnnnnnnnnnnnnnnnnnnnnnnnnnnnnnnnnnnnnnnnnnnnnnnnnnnnnnnnnnnnnnnnnnnnnnnnnnnnnnnnnnnnnnnnnnnnnnnnnnnnnnnnnnnnnnnnnnnnnnnnnnnnnnnnnnnnnnnnnnnnnnnnnnnnnnnnnnnnnnnnnnnnnnnnnnnnnnnnnnnnnnnnnnnnnnnnnnnnnnnnnnnnnnnnnnnnnnnnnnnnnnnnnnnnnnnnnnnnnnnnnnnnnnnnnnnnnnnnnnnnnnnnnnnnnnnnnnnnnnnnnnnnnnnnnnnnnnnnnnnnnnnnnnnnnnnnnnnnnnnnnnnnnnnnnnnnnnnnnnnnnnnnnnnnnnnnnnnnnnnnnnnnnnnnnnnnnnnnnnnnnnnnnnnnnnnnnnnnnnnnnnnnnnnnnnnnnnnnnnnnnnnnnnnnnnnnnnnnnnnnnnnnnnnnnnnnnnnnnnnnnnnnnnnnnnnnnnnnnnnnnnnnnnnnnnnnnnnnnnnnnnnnnnnnnnnnnnnnnnnnnnnnnnnnnnnnnnnnnnnnnnnnnnnnnnnnnnnnnnnnnnnnnnnnnnnnnnnnnnnnnnnnnnnnnnnnnnnnnnnnnnnnnnnnnnnnnnnnnnnnnnnnnnnnnnnnnnnnnnnnnnnnnnnnnnnnnnnnnnnnnnnnnnnnnnnnnnnnnnnnnnnnnnnnnnnnnnnnnnnnnnnnnnnnnnnnnnnnnnnnnnnnnnnnnnnnnnnnnnnnnnnnnnnnnnnnnnnnnnnnnnnnnnnnnnnnnnnnnnnnnnnnnnnnnnnnnnnnnnnnnnnnnnnnnnnnnnnnnnnnnnnnnnnnnnnnnnnnnnnnnnnnnnnnnnnnnnnnnnnnnnnnnnnnnnnnnnnnnnnnnnnnnnnnnnnnnnnnnnnnnnnnnnnnnnnnnnnnnnnnnnnnnnnnnnnnnnnnnnnnnnnnnnnnnnnnnnnnnnnnnnnnnnnnnnnnnnnnnnnnnnnnnnnnnnnnnnnnnnnnnnnnnnnnnnnnnnnnnnnnnnnnnnnnnnnnnnnnnnnnnnnnnnnnnnnnnnnnnnnnnnnnnnnnnnnnnnnnnnnnnnnnnnnnnnnnnnnnnnnnnnnnnnnnnnnnnnnnnnnnnnnnnnnnnnnnnnnnnnnnnnnnnnnnnnnnnnnnnnnnnnnnnnnnnnnnnnnnnnnnnnnnnnnnnnnnnnnnnnnnnnnnnnnnnnnnnnnnnnnnnnnnnnnnnnnnnnnnnnnnnnnnnnnnnnnnnnnnnnnnnnnnnnnnnnnnnnnnnnnnnnnnnnnnnnnnnnnnnnnnnnnnnnnnnnnnnnnnnnnnnnnnnnnnnnnnnnnnnnnnnnnnnnnnnnnnnnnnnnnnnnnnnnnnnnnnnnnnnnnnnnnnnnnnnnnnnnnnnnnnnnnnnnnnnnnnnnnnnnnnnnnnnnnnnnnnnnnnnnnnnnnnnnnnnnnnnnnnnnnnnnnnnnnnnnnnnnnnnnnnnnnnnnnnnnnnnnnnnnnnnnnnnnnnnnnnnnnnnnnnnnnnnnnnnnnnnnnnnnnnnnnnnnnnnnnnnnnnnnnnnnnnnnnnnnnnnnnnnnnnnnnnnnnnnnnnnnnnnnnnnnnnnnnnnnnnnnnnnnnnnnnnnnnnnnnnnnnnnnnnnnnnnnnnnnnnnnnnnnnnnnnnnnnnnnnnnnnnnnnnnnnnnnnnnnnnnnnnnnnnnnnnnnnnnnnnnnnnnnnnnnnnnnnnnnnnnnnnnnnnnnnnnnnnnnnnnnnnnnnnnnnnnnnnnnnnnnnnnnnnnnnnnnnnnnnnnnnnnnnnnnnnnnnnnnnnnnnnnnnnnnnnnnnnnnnnnnnnnnnnnnnnnnnnnnnnnnnnnnnnnnnnnnnnnnnnnnnnnnnnnnnnnnnnnnnnnnnnnnnnnnnnnnnnnnnnnnnnnnnnnnnnnnnnnnnnnnnnnnnnnnnnnnnnnnnnnnnnnnnnnnnnnnnnnnnnnnnnnnnnnnnnnnnnnnnnnnnnnnnnnnnnnnnnnnnnnnnnnnnnnnnnnnnnnnnnnnnnnnnnnnnnnnnnnnnnnnnnnnnnnnnnnnnnnnnnnnnnnnnnnnnnnnnnnnnnnnnnnnnnnnnnnnnnnnnnnnnnnnnnnnnnnnnnnnnnnnnnnnnnnnnnnnnnnnnnnnnnnnnnnnnnnnnnnnnnnnnnnnnnnnnnnnnnnnnnnnnnnnnnnnnnnnnnnnnnnnnnnnnnnnnnnnnnnnnnnnnnnnnnnnnnnnnnnnnnnnnnnnnnnnnnnnnnnnnnnnnnnnnnnnnnnnnnnnnnnnnnnnnnnnnnnnnnnnnnnnnnnnnnnnnnnnnnnnnnnnnnnnnnnnnnnnnnnnnnnnnnnnnnnnnnnnnnnnnnnnnnnnnnnnnnnnnnnnnnnnnnnnnnnnnnnnnnnnnnnnnnnnnnnnnnnnnnnnnnnnnnnnnnnnnnnnnnnnnnnnnnnnnnnnnnnnnnnnnnnnnnnnnnnnnnnnnnnnnnnnnnnnnnnnnnnnnnnnnnnnnnnnnnnnnnnnnnnnnnnnnnnnnnnnnnnnnnnnnnnnnnnnnnnnnnnnnnnnnnnnnnnnnnnnnnnnnnnnnnnnnnnnnnnnnnnnnnnnnnnnnnnnnnnnnnnnnnnnnnnnnnnnnnnnnnnnnnnnnnnnnnnnnnnnnnnnnnnnnnnnnnnnnnnnnnnnnnnnnnnnnnnnnnnnnnnnnnnnnnnnnnnnnnnnnnnnnnnnnnnnnnnnnnnnnnnnnnnnnnnnnnnnnnnnnnnnnnnnnnnnnnnnnnnnnnnnnnnnnnnnnnnnnnnnnnnnnnnnnnnnnnnnnnnnnnnnnnnnnnnnnnnnnnnnnnnnnnnnnnnnnnnnnnnnnnnnnnnnnnnnnnnnnnnnnnnnnnnnnnnnnnnnnnnnnnnnnnnnnnnnnnnnnnnnnnnnnnnnnnnnnnnnnnnnnnnnnnnnnnnnnnnnnnnnnnnnnnnnnnnnnnnnnnnnnnnnnnnnnnnnnnnnnnnnnnnnnnnnnnnnnnnnnnnnnnnnnnnnnnnnnnnnnnnnnnnnnnnnnnnnnnnnnnnnnnnnnnnnnnnnnnnnnnnnnnnnnnnnnnnnnnnnnnnnnnnnnnnnnnnnnnnnnnnnnnnnnnnnnnnnnnnnnnnnnnnnnnnnnnnnnnnnnnnnnnnnnnnnnnnnnnnnnnnnnnnnnnnnnnnnnnnnnnnnnnnnnnnnnnnnnnnnnnnnnnnnnnnnnnnnnnnnnnnnnnnnnnnnnnnnnnnnnnnnnnnnnnnnnnnnnnnnnnnnnnnnnnnnnnnnnnnnnnnnnnnnnnnnnnnnnnnnnnnnnnnnnnnnnnnnnnnnnnnnnnnnnnnnnnnnnnnnnnnnnnnnnnnnnnnnnnnnnnnnnnnnnnnnnnnnnnnnnnnnnnnnnnnnnnnnnnnnnnnnnnnnnnnnnnnnnnnnnnnnnnnnnnnnnnnnnnnnnnnnnnnnnnnnnnnnnnnnnnnnnnnnnnnnnnnnnnnnnnnnnnnnnnnnnnnnnnnnnnnnnnnnnnnnnnnnnnnnnnnnnnnnnnnnnnnnnnnnnnnnnnnnnnnnnnnnnnnnnnnnnnnnnnnnnnnnnnnnnnnnnnnnnnnnnnnnnnnnnnnnnnnnnnnnnnnnnnnnnnnnnnnnnnnnnnnnnnnnnnnnnnnnnnnnnnnnnnnnnnnnnnnnnnnnnnnnnnnnnnnnnnnnnnnnnnnnnnnnnnnnnnnnnnnnnnnnnnnnnnnnnnnnnnnnnnnnnnnnnnnnnnnnnnnnnnnnnnnnnnnnnnnnnnnnnnnnnnnnnnnnnnnnnnnnnnnnnnnnnnnnnnnnnnnnnnnnnnnnnnnnnnnnnnnnnnnnnnnnnnnnnnnnnnnnnnnnnnnnnnnnnnnnnnnnnnnnnnnnnnnnnnnnnnnnnnnnnnnnnnnnnnnnnnnnnnnnnnnnnnnnnnnnnnnnnnnnnnnnnnnnnnnnnnnnnnnnnnnnnnnnnnnnnnnnnnnnnnnnnnnnnnnnnnnnnnnnnnnnnnnnnnnnnnnnnnnnnnnnnnnnnnnnnnnnnnnnnnnnnnnnnnnnnnnnnnnnnnnnnnnnnnnnnnnnnnnnnnnnnnnnnnnnnnnnnnnnnnnnnnnnnnnnnnnnnnnnnnnnnnnnnnnnnnnnnnnnnnnnnnnnnnnnnnnnnnnnnnnnnnnnnnnnnnnnnnnnnnnnnnnnnnnnnnnnnnnnnnnnnnnnnnnnnnnnnnnnnnnnnnnnnnnnnnnnnnnnnnnnnnnnnnnnnnnnnnnnnnnnnnnnnnnnnnnnnnnnnnnnnnnnnnnnnnnnnnnnnnnnnnnnnnnnnnnnnnnnnnnnnnnnnnnnnnnnnnnnnnnnnnnnnnnnnnnnnnnnnnnnnnnnnnnnnnnnnnnnnnnnnnnnnnnnnnnnnnnnnnnnnnnnnnnnnnnnnnnnnnnnnnnnnnnnnnnnnnnnnnnnnnnnnnnnnnnnnnnnnnnnnnnnnnnnnnnnnnnnnnnnnnnnnnnnnnnnnnnnnnnnnnnnnnnnnnnnnnnnnnnnnnnnnnnnnnnnnnnnnnnnnnnnnnnnnnnnnnnnnnnnnnnnnnnnnnnnnnnnnnnnnnnnnnnnnnnnnnnnnnnnnnnnnnnnnnnnnnnnnnnnnnnnnnnnnnnnnnnnnnnnnnnnnnnnnnnnnnnnnnnnnnnnnnnnnnnnnnnnnnnnnnnnnnnnnnnnnnnnnnnnnnnnnnnnnnnnnnnnnnnnnnnnnnnnnnnnnnnnnnnnnnnnnnnnnnnnnnnnnnnnnnnnnnnnnnnnnnnnnnnnnnnnnnnnnnnnnnnnnnnnnnnnnnnnnnnnnnnnnnnnnnnnnnnnnnnnnnnnnnnnnnnnnnnnnnnnnnnnnnnnnnnnnnnnnnnnnnnnnnnnnnnnnnnnnnnnnnnnnnnnnnnnnnnnnnnnnnnnnnnnnnnnnnnnnnnnnnnnnnnnnnnnnnnnnnnnnnnnnnnnnnnnnnnnnnnnnnnnnnnnnnnnnnnnnnnnnnnnnnnnnnnnnnnnnnnnnnnnnnnnnnnnnnnnnnnnnnnnnnnnnnnnnnnnnnnnnnnnnnnnnnnnnnnnnnnnnnnnnnnnnnnnnnnnnnnnnnnnnnnnnnnnnnnnnnnnnnnnnnnnnnnnnnnnnnnnnnnnnnnnnnnnnnnnnnnnnnnnnnnnnnnnnnnnnnnnnnnnnnnnnnnnnnnnnnnnnnnnnnnnnnnnnnnnnnnnnnnnnnnnnnnnnnnnnnnnnnnnnnnnnnnnnnnnnnnnnnnnnnnnnnnnnnnnnnnnnnnnnnnnnnnnnnnnnnnnnnnnnnnnnnnnnnnnnnnnnnnnnnnnnnnnnnnnnnnnnnnnnnnnnnnnnnnnnnnnnnnnnnnnnnnnnnnnnnnnnnnnnnnnnnnnnnnnnnnnnnnnnnnnnnnnnnnnnnnnnnnnnnnnnnnnnnnnnnnnnnnnnnnnnnnnnnnnnnnnnnnnnnnnnnnnnnnnnnnnnnnnnnnnnnnnnnnnnnnnnnnnnnnnnnnnnnnnnnnnnnnnnnnnnnnnnnnnnnnnnnnnnnnnnnnnnnnnnnnnnnnnnnnnnnnnnnnnnnnnnnnnnnnnnnnnnnnnnnnnnnnnnnnnnnnnnnnnnnnnnnnnnnnnnnnnnnnnnnnnnnnnnnnnnnnnnnnnnnnnnnnnnnnnnnnnnnnnnnnnnnnnnnnnnnnnnnnnnnnnnnnnnnnnnnnnnnnnnnnnnnnnnnnnnnnnnnnnnnnnnnnnnnnnnnnnnnnnnnnnnnnnnnnnnnnnnnnnnnnnnnnnnnnnnnnnnnnnnnnnnnnnnnnnnnnnnnnnnnnnnnnnnnnnnnnnnnnnnnnnnnnnnnnnnnnnnnnnnnnnnnnnnnnnnnnnnnnnnnnnnnnnnnnnnnnnnnnnnnnnnnnnnnnnnnnnnnnnnnnnnnnnnnnnnnnnnnnnnnnnnnnnnnnnnnnnnnnnnnnnnnnnnnnnnnnnnnnnnnnnnnnnnnnnnnnnnnnnnnnnnnnnnnnnnnnnnnnnnnnnnnnnnnnnnnnnnnnnnnnnnnnnnnnnnnnnnnnnnnnnnnnnnnnnnnnnnnnnnnnnnnnnnnnnnnnnnnnnnnnnnnnnnnnnnnnnnnnnnnnnnnnnnnnnnnnnnnnnnnnnnnnnnnnnnnnnnnnnnnnnnnnnnnnnnnnnnnnnnnnnnnnnnnnnnnnnnnnnnnnnnnnnnnnnnnnnnnnnnnnnnnnnnnnnnnnnnnnnnnnnnnnnnnnnnnnnnnnnnnnnnnnnnnnnnnnnnnnnnnnnnnnnnnnnnnnnnnnnnnnnnnnnnnnnnnnnnnnnnnnnnnnnnnnnnnnnnnnnnnnnnnnnnnnnnnnnnnnnnnnnnnnnnnnnnnnnnnnnnnnnnnnnnnnnnnnnnnnnnnnnnnnnnnnnnnnnnnnnnnnnnnnnnnnnnnnnnnnnnnnnnnnnnnnnnnnnnnnnnnnnnnnnnnnnnnnnnnnnnnnnnnnnnnnnnnnnnnnnnnnnnnnnnnnnnnnnnnnnnnnnnnnnnnnnnnnnnnnnnnnnnnnnnnnnnnnnnnnnnnnnnnnnnnnnnnnnnnnnnnnnnnnnnnnnnnnnnnnnnnnnnnnnnnnnnnnnnnnnnnnnnnnnnnnnnnnnnnnnnnnnnnnnnnnnnnnnnnnnnnnnnnnnnnnnnnnnnnnnnnnnnnnnnnnnnnnnnnnnnnnnnnnnnnnnnnnnnnnnnnnnnnnnnnnnnnnnnnnnnnnnnnnnnnnnnnnnnnnnnnnnnnnnnnnnnnnnnnnnnnnnnnnnnnnnnnnnnnnnnnnnnnnnnnnnnnnnnnnnnnnnnnnnnnnnnnnnnnnnnnnnnnnnnnnnnnnnnnnnnnnnnnnnnnnnnnnnnnnnnnnnnnnnnnnnnnnnnnnnnnnnnnnnnnnnnnnnnnnnnnnnnnnnnnnnnnnnnnnnnnnnnnnnnnnnnnnnnnnnnnnnnnnnnnnnnnnnnnnnnnnnnnnnnnnnnnnnnnnnnnnnnnnnnnnnnnnnnnnnnnnnnnnnnnnnnnnnnnnnnnnnnnnnnnnnnnnnnnnnnnnnnnnnnnnnnnnnnnnnnnnnnnnnnnnnnnnnnnnnnnnnnnnnnnnnnnnnnnnnnnnnnnnnnnnnnnnnnnnnnnnnnnnnnnnnnnnnnnnnnnnnnnnnnnnnnnnnnnnnnnnnnnnnnnnnnnnnnnnnnnnnnnnnnnnnnnnnnnnnnnnnnnnnnnnnnnnnnnnnnnnnnnnnnnnnnnnnnnnnnnnnnnnnnnnnnnnnnnnnnnnnnnnnnnnnnnnnnnnnnnnnnnnnnnnnnnnnnnnnnnnnnnnnnnnnnnnnnnnnnnnnnnnnnnnnnnnnnnnnnnnnnnnnnnnnnnnnnnnnnnnnnnnnnnnnnnnnnnnnnnnnnnnnnnnnnnnnnnnnnnnnnnnnnnnnnnnnnnnnnnnnnnnnnnnnnnnnnnnnnnnnnnnnnnnnnnnnnnnnnnnnnnnnnnnnnnnnnnnnnnnnnnnnnnnnnnnnnnnnnnnnnnnnnnnnnnnnnnnnnnnnnnnnnnnnnnnnnnnnnnnnnnnnnnnnnnnnnnnnnnnnnnnnnnnnnnnnnnnnnnnnnnnnnnnnnnnnnnnnnnnnnnnnnnnnnnnnnnnnnnnnnnnnnnnnnnnnnnnnnnnnnnnnnnnnnnnnnnnnnnnnnnnnnnnnnnnnnnnnnnnnnnnnnnnnnnnnnnnnnnnnnnnnnnnnnnnnnnnnnnnnnnnnnnnnnnnnnnnnnnnnnnnnnnnnnnnnnnnnnnnnnnnnnnnnnnnnnnnnnnnnnnnnnnnnnnnnnnnnnnnnnnnnnnnnnnnnnnnnnnnnnnnnnnnnnnnnnnnnnnnnnnnnnnnnnnnnnnnnnnnnnnnnnnnnnnnnnnnnnnnnnnnnnnnnnnnnnnnnnnnnnnnnnnnnnnnnnnnnnnnnnnnnnnnnnnnnnnnnnnnnnnnnnnnnnnnnnnnnnnnnnnnnnnnnnnnnnnnnnnnnnnnnnnnnnnnnnnnnnnnnnnnnnnnnnnnnnnnnnnnnnnnnnnnnnnnnnnnnnnnnnnnnnnnnnnnnnnnnnnnnnnnnnnnnnnnnnnnnnnnnnnnnnnnnnnnnnnnnnnnnnnnnnnnnnnnnnnnnnnnnnnnnnnnnnnnnnnnnnnnnnnnnnnnnnnnnnnnnnnnnnnnnnnnnnnnnnnnnnnnnnnnnnnnnnnnnnnnnnnnnnnnnnnnnnnnnnnnnnnnnnnnnnnnnnnnnnnnnnnnnnnnnnnnnnnnnnnnnnnnnnnnnnnnnnnnnnnnnnnnnnnnnnnnnnnnnnnnnnnnnnnnnnnnnnnnnnnnnnnnnnnnnnnnnnnnnnnnnnnnnnnnnnnnnnnnnnnnnnnnnnnnnnnnnnnnnnnnnnnnnnnnnnnnnnnnnnnnnnnnnnnnnnnnnnnnnnnnnnnnnnnnnnnnnnnnnnnnnnnnnnnnnnnnnnnnnnnnnnnnnnnnnnnnnnnnnnnnnnnnnnnnnnnnnnnnnnnnnnnnnnnnnnnnnnnnnnnnnnnnnnnnnnnnnnnnnnnnnnnnnnnnnnnnnnnnnnnnnnnnnnnnnnnnnnnnnnnnnnnnnnnnnnnnnnnnnnnnnnnnnnnnnnnnnnnnnnnnnnnnnnnnnnnnnnnnnnnnnnnnnnnnnnnnnnnnnnnnnnnnnnnnnnnnnnnnnnnnnnnnnnnnnnnnnnnnnnnnnnnnnnnnnnnnnnnnnnnnnnnnnnnnnnnnnnnnnnnnnnnnnnnnnnnnnnnnnnnnnnnnnnnnnnnnnnnnnnnnnnnnnnnnnnnnnnnnnnnnnnnnnnnnnnnnnnnnnnnnnnnnnnnnnnnnnnnnnnnnnnnnnnnnnnnnnnnnnnnnnnnnnnnnnnnnnnnnnnnnnnnnnnnnnnnnnnnnnnnnnnnnnnnnnnnnnnnnnnnnnnnnnnnnnnnnnnnnnnnnnnnnnnnnnnnnnnnnnnnnnnnnnnnnnnnnnnnnnnnnnnnnnnnnnnnnnnnnnnnnnnnnnnnnnnnnnnnnnnnnnnnnnnnnnnnnnnnnnnnnnnnnnnnnnnnnnnnnnnnnnnnnnnnnnnnnnnnnnnnnnnnnnnnnnnnnnnnnnnnnnnnnnnnnnnnnnnnnnnnnnnnnnnnnnnnnnnnnnnnnnnnnnnnnnnnnnnnnnnnnnnnnnnnnnnnnnnnnnnnnnnnnnnnnnnnnnnnnnnnnnnnnnnnnnnnnnnnnnnnnnnnnnnnnnnnnnnnnnnnnnnnnnnnnnnnnnnnnnnnnnnnnnnnnnnnnnnnnnnnnnnnnnnnnnnnnnnnnnnnnnnnnnnnnnnnnnnnnnnnnnnnnnnnnnnnnnnnnnnnnnnnnnnnnnnnnnnnnnnnnnnnnnnnnnnnnnnnnnnnnnnnnnnnnnnnnnnnnnnnnnnnnnnnnnnnnnnnnnnnnnnnnnnnnnnnnnnnnnnnnnnnnnnnnnnnnnnnnnnnnnnnnnnnnnnnnnnnnnnnnnnnnnnnnnnnnnnnnnnnnnnnnnnnnnnnnnnnnnnnnnnnnnnnnnnnnnnnnnnnnnnnnnnnnnnnnnnnnnnnnnnnnnnnnnnnnnnnnnnnnnnnnnnnnnnnnnnnnnnnnnnnnnnnnnnnnnnnnnnnnnnnnnnnnnnnnnnnnnnnnnnnnnnnnnnnnnnnnnnnnnnnnnnnnnnnnnnnnnnnnnnnnnnnnnnnnnnnnnnnnnnnnnnnnnnnnnnnnnnnnnnnnnnnnnnnnnnnnnnnnnnnnnnnnnnnnnnnnnnnnnnnnnnnnnnnnnnnnnnnnnnnnnnnnnnnnnnnnnnnnnnnnnnnnnnnnnnnnnnnnnnnnnnnnnnnnnnnnnnnnnnnnnnnnnnnnnnnnnnnnnnnnnnnnnnnnnnnnnnnnnnnnnnnnnnnnnnnnnnnnnnnnnnnnnnnnnnnnnnnnnnnnnnnnnnnnnnnnnnnnnnnnnnnnnnnnnnnnnnnnnnnnnnnnnnnnnnnnnnnnnnnnnnnnnnnnnnnnnnnnnnnnnnnnnnnnnnnnnnnnnnnnnnnnnnnnnnnnnnnnnnnnnnnnnnnnnnnnnnnnnnnnnnnnnnnnnnnnnnnnnnnnnnnnnnnnnnnnnnnnnnnnnnnnnnnnnnnnnnnnnnnnnnnnnnnnnnnnnnnnnnnnnnnnnnnnnnnnnnnnnnnnnnnnnnnnnnnnnnnnnnnnnnnnnnnnnnnnnnnnnnnnnnnnnnnnnnnnnnnnnnnnnnnnnnnnnnnnnnnnnnnnnnnnnnnnnnnnnnnnnnnnnnnnnnnnnnnnnnnnnnnnnnnnnnnnnnnnnnnnnnnnnnnnnnnnnnnnnnnnnnnnnnnnnnnnnnnnnnnnnnnnnnnnnnnnnnnnnnnnnnnnnnnnnnnnnnnnnnnnnnnnnnnnnnnnnnnnnnnnnnnnnnnnnnnnnnnnnnnnnnnnnnnnnnnnnnnnnnnnnnnnnnnnnnnnnnnnnnnnnnnnnnnnnnnnnnnnnnnnnnnnnnnnnnnnnnnnnnnnnnnnnnnnnnnnnnnnnnnnnnnnnnnnnnnnnnnnnnnnnnnnnnnnnnnnnnnnnnnnnnnnnnnnnnnnnnnnnnnnnnnnnnnnnnnnnnnnnnnnnnnnnnnnnnnnnnnnnnnnnnnnnnnnnnnnnnnnnnnnnnnnnnnnnnnnnnnnnnnnnnnnnnnnnnnnnnnnnnnnnnnnnnnnnnnnnnnnnnnnnnnnnnnnnnnnnnnnnnnnnnnnnnnnnnnnnnnnnnnnnnnnnnnnnnnnnnnnnnnnnnnnnnnnnnnnnnnnnnnnnnnnnnnnnnnnnnnnnnnnnnnnnnnnnnnnnnnnnnnnnnnnnnnnnnnnnnnnnnnnnnnnnnnnnnnnnnnnnnnnnnnnnnnnnnnnnnnnnnnnnnnnnnnnnnnnnnnnnnnnnnnnnnnnnnnnnnnnnnnnnnnnnnnnnnnnnnnnnnnnnnnnnnnnnnnnnnnnnnnnnnnnnnnnnnnnnnnnnnnnnnnnnnnnnnnnnnnnnnnnnnnnnnnnnnnnnnnnnnnnnnnnnnnnnnnnnnnnnnnnnnnnnnnnnnnnnnnnnnnnnnnnnnnnnnnnnnnnnnnnnnnnnnnnnnnnnnnnnnnnnnnnnnnnnnnnnnnnnnnnnnnnnnnnnnnnnnnnnnnnnnnnnnnnnnnnnnnnnnnnnnnnnnnnnnnnnnnnnnnnnnnnnnnnnnnnnnnnnnnnnnnnnnnnnnnnnnnnnnnnnnnnnnnnnnnnnnnnnnnnnnnnnnnnnnnnnnnnnnnnnnnnnnnnnnnnnnnnnnnnnnnnnnnnnnnnnnnnnnnnnnnnnnnnnnnnnnnnnnnnnnnnnnnnnnnnnnnnnnnnnnnnnnnnnnnnnnnnnnnnnnnnnnnnnnnnnnnnnnnnnnnnnnnnnnnnnnnnnnnnnnnnnnnnnnnnnnnnnnnnnnnnnnnnnnnnnnnnnnnnnnnnnnnnnnnnnnnnnnnnnnnnnnnnnnnnnnnnnnnnnnnnnnnnnnnnnnnnnnnnnnnnnnnnnnnnnnnnnnnnnnnnnnnnnnnnnnnnnnnnnnnnnnnnnnnnnnnnnnnnnnnnnnnnnnnnnnnnnnnnnnnnnnnnnnnnnnnnnnnnnnnnnnnnnnnnnnnnnnnnnnnnnnnnnnnnnnnnnnnnnnnnnnnnnnnnnnnnnnnnnnnnnnnnnnnnnnnnnnnnnnnnnnnnnnnnnnnnnnnnnnnnnnnnnnnnnnnnnnnnnnnnnnnnnnnnnnnnnnnnnnnnnnnnnnnnnnnnnnnnnnnnnnnnnnnnnnnnnnnnnnnnnnnnnnnnnnnnnnnnnnnnnnnnnnnnnnnnnnnnnnnnnnnnnnnnnnnnnnnnnnnnnnnnnnnnnnnnnnnnnnnnnnnnnnnnnnnnnnnnnnnnnnnnnnnnnnnnnnnnnnnnnnnnnnnnnnnnnnnnnnnnnnnnnnnnnnnnnnnnnnnnnnnnnnnnnnnnnnnnnnnnnnnnnnnnnnnnnnnnnnnnnnnnnnnnnnnnnnnnnnnnnnnnnnnnnnnnnnnnnnnnnnnnnnnnnnnnnnnnnnnnnnnnnnnnnnnnnnnnnnnnnnnnnnnnnnnnnnnnnnnnnnnnnnnnnnnnnnnnnnnnnnnnnnnnnnnnnnnnnnnnnnnnnnnnnnnnnnnnnnnnnnnnnnnnnnnnnnnnnnnnnnnnnnnnnnnnnnnnnnnnnnnnnnnnnnnnnnnnnnnnnnnnnnnnnnnnnnnnnnnnnnnnnnnnnnnnnnnnnnnnnnnnnnnnnnnnnnnnnnnnnnnnnnnnnnnnnnnnnnnnnnnnnnnnnnnnnnnnnnnnnnnnnnnnnnnnnnnnnnnnnnnnnnnnnnnnnnnnnnnnnnnnnnnnnnnnnnnnnnnnnnnnnnnnnnnnnnnnnnnnnnnnnnnnnnnnnnnnnnnnnnnnnnnnnnnnnnnnnnnnnnnnnnnnnnnnnnnnnnnnnnnnnnnnnnnnnnnnnnnnnnnnnnnnnnnnnnnnnnnnnnnnnnnnnnnnnnnnnnnnnnnnnnnnnnnnnnnnnnnnnnnnnnnnnnnnnnnnnnnnnnnnnnnnnnnnnnnnnnnnnnnnnnnnnnnnnnnnnnnnnnnnnnnnnnnnnnnnnnnnnnnnnnnnnnnnnnnnnnnnnnnnnnnnnnnnnnnnnnnnnnnnnnnnnnnnnnnnnnnnnnnnnnnnnnnnnnnnnnnnnnnnnnnnnnnnnnnnnnnnnnnnnnnnnnnnnnnnnnnnnnnnnnnnnnnnnnnnnnnnnnnnnnnnnnnnnnnnnnnnnnnnnnnnnnnnnnnnnnnnnnnnnnnnnnnnnnnnnnnnnnnnnnnnnnnnnnnnnnnnnnnnnnnnnnnnnnnnnnnnnnnnnnnnnnnnnnnnnnnnnnnnnnnnnnnnnnnnnnnnnnnnnnnnnnnnnnnnnnnnnnnnnnnnnnnnnnnnnnnnnnnnnnnnnnnnnnnnnnnnnnnnnnnnnnnnnnnnnnnnnnnnnnnnnnnnnnnnnnnnnnnnnnnnnnnnnnnnnnnnnnnnnnnnnnnnnnnnnnnnnnnnnnnnnnnnnnnnnnnnnnnnnnnnnnnnnnnnnnnnnnnnnnnnnnnnnnnnnnnnnnnnnnnnnnnnnnnnnnnnnnnnnnnnnnnnnnnnnnnnnnnnnnnnnnnnnnnnnnnnnnnnnnnnnnnnnnnnnnnnnnnnnnnnnnnnnnnnnnnnnnnnnnnnnnnnnnnnnnnnnnnnnnnnnnnnnnnnnnnnnnnnnnnnnnnnnnnnnnnnnnnnnnnnnnnnnnnnnnnnnnnnnnnnnnnnnnnnnnnnnnnnnnnnnnnnnnnnnnnnnnnnnnnnnnnnnnnnnnnnnnnnnnnnnnnnnnnnnnnnnnnnnnnnnnnnnnnnnnnnnnnnnnnnnnnnnnnnnnnnnnnnnnnnnnnnnnnnnnnnnnnnnnnnnnnnnnnnnnnnnnnnnnnnnnnnnnnnnnnnnnnnnnnnnnnnnnnnnnnnnnnnnnnnnnnnnnnnnnnnnnnnnnnnnnnnnnnnnnnnnnnnnnnnnnnnnnnnnnnnnnnnnnnnnnnnnnnnnnnnnnnnnnnnnnnnnnnnnnnnnnnnnnnnnnnnnnnnnnnnnnnnnnnnnnnnnnnnnnnnnnnnnnnnnnnnnnnnnnnnnnnnnnnnnnnnnnnnnnnnnnnnnnnnnnnnnnnnnnnnnnnnnnnnnnnnnnnnnnnnnnnnnnnnnnnnnnnnnnnnnnnnnnnnnnnnnnnnnnnnnnnnnnnnnnnnnnnnnnnnnnnnnnnnnnnnnnnnnnnnnnnnnnnnnnnnnnnnnnnnnnnnnnnnnnnnnnnnnnnnnnnnnnnnnnnnnnnnnnnnnnnnnnnnnnnnnnnnnnnnnnnnnnnnnnnnnnnnnnnnnnnnnnnnnnnnnnnnnnnnnnnnnnnnnnnnnnnnnnnnnnnnnnnnnnnnnnnnnnnnnnnnnnnnnnnnnnnnnnnnnnnnnnnnnnnnnnnnnnnnnnnnnnnnnnnnnnnnnnnnnnnnnnnnnnnnnnnnnnnnnnnnnnnnnnnnnnnnnnnnnnnnnnnnnnnnnnnnnnnnnnnnnnnnnnnnnnnnnnnnnnnnnnnnnnnnnnnnnnnnnnnnnnnnnnnnnnnnnnnnnnnnnnnnnnnnnnnnnnnnnnnnnnnnnnnnnnnnnnnnnnnnnnnnnnnnnnnnnnnnnnnnnnnnnnnnnnnnnnnnnnnnnnnnnnnnnnnnnnnnnnnnnnnnnnnnnnnnnnnnnnnnnnnnnnnnnnnnnnnnnnnnnnnnnnnnnnnnnnnnnnnnnnnnnnnnnnnnnnnnnnnnnnnnnnnnnnnnnnnnnnnnnnnnnnnnnnnnnnnnnnnnnnnnnnnnnnnnnnnnnnnnnnnnnnnnnnnnnnnnnnnnnnnnnnnnnnnnnnnnnnnnnnnnnnnnnnnnnnnnnnnnnnnnnnnnnnnnnnnnnnnnnnnnnnnnnnnnnnnnnnnnnnnnnnnnnnnnnnnnnnnnnnnnnnnnnnnnnnnnnnnnnnnnnnnnnnnnnnnnnnnnnnnnnnnnnnnnnnnnnnnnnnnnnnnnnnnnnnnnnnnnnnnnnnnnnnnnnnnnnnnnnnnnnnnnnnnnnnnnnnnnnnnnnnnnnnnnnnnnnnnnnnnnnnnnnnnnnnnnnnnnnnnnnnnnnnnnnnnnnnnnnnnnnnnnnnnnnnnnnnnnnnnnnnnnnnnnnnnnnnnnnnnnnnnnnnnnnnnnnnnnnnnnnnnnnnnnnnnnnnnnnnnnnnnnnnnnnnnnnnnnnnnnnnnnnnnnnnnnnnnnnnnnnnnnnnnnnnnnnnnnnnnnnnnnnnnnnnnnnnnnnnnnnnnnnnnnnnnnnnnnnnnnnnnnnnnnnnnnnnnnnnnnnnnnnnnnnnnnnnnnnnnnnnnnnnnnnnnnnnnnnnnnnnnnnnnnnnnnnnnnnnnnnnnnnnnnnnnnnnnnnnnnnnnnnnnnnnnnnnnnnnnnnnnnnnnnnnnnnnnnnnnnnnnnnnnnnnnnnnnnnnnnnnnnnnnnnnnnnnnnnnnnnnnnnnnnnnnnnnnnnnnnnnnnnnnnnnnnnnnnnnnnnnnnnnnnnnnnnnnnnnnnnnnnnnnnnnnnnnnnnnnnnnnnnnnnnnnnnnnnnnnnnnnnnnnnnnnnnnnnnnnnnnnnnnnnnnnnnnnnnnnnnnnnnnnnnnnnnnnnnnnnnnnnnnnnnnnnnnnnnnnnnnnnnnnnnnnnnnnnnnnnnnnnnnnnnnnnnnnnnnnnnnnnnnnnnnnnnnnnnnnnnnnnnnnnnnnnnnnnnnnnnnnnnnnnnnnnnnnnnnnnnnnnnnnnnnnnnnnnnnnnnnnnnnnnnnnnnnnnnnnnnnnnnnnnnnnnnnnnnnnnnnnnnnnnnnnnnnnnnnnnnnnnnnnnnnnnnnnnnnnnnnnnnnnnnnnnnnnnnnnnnnnnnnnnnnnnnnnnnnnnnnnnnnnnnnnnnnnnnnnnnnnnnnnnnnnnnnnnnnnnnnnnnnnnnnnnnnnnnnnnnnnnnnnnnnnnnnnnnnnnnnnnnnnnnnnnnnnnnnnnnnnnnnnnnnnnnnnnnnnnnnnnnnnnnnnnnnnnnnnnnnnnnnnnnnnnnnnnnnnnnnnnnnnnnnnnnnnnnnnnnnnnnnnnnnnnnnnnnnnnnnnnnnnnnnnnnnnnnnnnnnnnnnnnnnnnnnnnnnnnnnnnnnnnnnnnnnnnnnnnnnnnnnnnnnnnnnnnnnnnnnnnnnnnnnnnnnnnnnnnnnnnnnnnnnnnnnnnnnnnnnnnnnnnnnnnnnnnnnnnnnnnnnnnnnnnnnnnnnnnnnnnnnnnnnnnnnnnnnnnnnnnnnnnnnnnnnnnnnnnnnnnnnnnnnnnnnnnnnnnnnnnnnnnnnnnnnnnnnnnnnnnnnnnnnnnnnnnnnnnnnnnnnnnnnnnnnnnnnnnnnnnnnnnnnnnnnnnnnnnnnnnnnnnnnnnnnnnnnnnnnnnnnnnnnnnnnnnnnnnnnnnnnnnnnnnnnnnnnnnnnnnnnnnnnnnnnnnnnnnnnnnnnnnnnnnnnnnnnnnnnnnnnnnnnnnnnnnnnnnnnnnnnnnnnnnnnnnnnnnnnnnnnnnnnnnnnnnnnnnnnnnnnnnnnnnnnnnnnnnnnnnnnnnnnnnnnnnnnnnnnnnnnnnnnnnnnnnnnnnnnnnnnnnnnnnnnnnnnnnnnnnnnnnnnnnnnnnnnnnnnnnnnnnnnnnnnnnnnnnnnnnnnnnnnnnnnnnnnnnnnnnnnnnnnnnnnnnnnnnnnnnnnnnnnnnnnnnnnnnnnnnnnnnnnnnnnnnnnnnnnnnnnnnnnnnnnnnnnnnnnnnnnnnnnnnnnnnnnnnnnnnnnnnnnnnnnnnnnnnnnnnnnnnnnnnnnnnnnnnnnnnnnnnnnnnnnnnnnnnnnnnnnnnnnnnnnnnnnnnnnnnnnnnnnnnnnnnnnnnnnnnnnnnnnnnnnnnnnnnnnnnnnnnnnnnnnnnnnnnnnnnnnnnnnnnnnnnnnnnnnnnnnnnnnnnnnnnnnnnnnnnnnnnnnnnnnnnnnnnnnnnnnnnnnnnnnnnnnnnnnnnnnnnnnnnnnnnnnnnnnnnnnnnnnnnnnnnnnnnnnnnnnnnnnnnnnnnnnnnnnnnnnnnnnnnnnnnnnnnnnnnnnnnnnnnnnnnnnnnnnnnnnnnnnnnnnnnnnnnnnnnnnnnnnnnnnnnnnnnnnnnnnnnnnnnnnnnnnnnnnnnnnnnnnnnnnnnnnnnnnnnnnnnnnnnnnnnnnnnnnnnnnnnnnnnnnnnnnnnnnnnnnnnnnnnnnnnnnnnnnnnnnnnnnnnnnnnnnnnnnnnnnnnnnnnnnnnnnnnnnnnnnnnnnnnnnnnnnnnnnnnnnnnnnnnnnnnnnnnnnnnnnnnnnnnnnnnnnnnnnnnnnnnnnnnnnnnnnnnnnnnnnnnnnnnnnnnnnnnnnnnnnnnnnnnnnnnnnnnnnnnnnnnnnnnnnnnnnnnnnnnnnnnnnnnnnnnnnnnnnnnnnnnnnnnnnnnnnnnnnnnnnnnnnnnnnnnnnnnnnnnnnnnnnnnnnnnnnnnnnnnnnnnnnnnnnnnnnnnnnnnnnnnnnnnnnnnnnnnnnnnnnnnnnnnnnnnnnnnnnnnnnnnnnnnnnnnnnnnnnnnnnnnnnnnnnnnnnnnnnnnnnnnnnnnnnnnnnnnnnnnnnnnnnnnnnnnnnnnnnnnnnnnnnnnnnnnnnnnnnnnnnnnnnnnnnnnnnnnnnnnnnnnnnnnnnnnnnnnnnnnnnnnnnnnnnnnnnnnnnnnnnnnnnnnnnnnnnnnnnnnnnnnnnnnnnnnnnnnnnnnnnnnnnnnnnnnnnnnnnnnnnnnnnnnnnnnnnnnnnnnnnnnnnnnnnnnnnnnnnnnnnnnnnnnnnnnnnnnnnnnnnnnnnnnnnnnnnnnnnnnnnnnnnnnnnnnnnnnnnnnnnnnnnnnnnnnnnnnnnnnnnnnnnnnnnnnnnnnnnnnnnnnnnnnnnnnnnnnnnnnnnnnnnnnnnnnnnnnnnnnnnnnnnnnnnnnnnnnnnnnnnnnnnnnnnnnnnnnnnnnnnnnnnnnnnnnnnnnnnnnnnnnnnnnnnnnnnnnnnnnnnnnnnnnnnnnnnnnnnnnnnnnnnnnnnnnnnnnnnnnnnnnnnnnnnnnnnnnnnnnnnnnnnnnnnnnnnnnnnnnnnnnnnnnnnnnnnnnnnnnnnnnnnnnnnnnnnnnnnnnnnnnnnnnnnnnnnnnnnnnnnnnnnnnnnnnnnnnnnnnnnnnnnnnnnnnnnnnnnnnnnnnnnnnnnnnnnnnnnnnnnnnnnnnnnnnnnnnnnnnnnnnnnnnnnnnnnnnnnnnnnnnnnnnnnnnnnnnnnnnnnnnnnnnnnnnnnnnnnnnnnnnnnnnnnnnnnnnnnnnnnnnnnnnnnnnnnnnnnnnnnnnnnnnnnnnnnnnnnnnnnnnnnnnnnnnnnnnnnnnnnnnnnnnnnnnnnnnnnnnnnnnnnnnnnnnnnnnnnnnnnnnnnnnnnnnnnnnnnnnnnnnnnnnnnnnnnnnnnnnnnnnnnnnnnnnnnnnnnnnnnnnnnnnnnnnnnnnnnnnnnnnnnnnnnnnnnnnnnnnnnnnnnnnnnnnnnnnnnnnnnnnnnnnnnnnnnnnnnnnnnnnnnnnnnnnnnnnnnnnnnnnnnnnnnnnnnnnnnnnnnnnnnnnnnnnnnnnnnnnnnnnnnnnnnnnnnnnnnnnnnnnnnnnnnnnnnnnnnnnnnnnnnnnnnnnnnnnnnnnnnnnnnnnnnnnnnnnnnnnnnnnnnnnnnnnnnnnnnnnnnnnnnnnnnnnnnnnnnnnnnnnnnnnnnnnnnnnnnnnnnnnnnnnnnnnnnnnnnnnnnnnnnnnnnnnnnnnnnnnnnnnnnnnnnnnnnnnnnnnnnnnnnnnnnnnnnnnnnnnnnnnnnnnnnnnnnnnnnnnnnnnnnnnnnnnnnnnnnnnnnnnnnnnnnnnnnnnnnnnnnnnnnnnnnnnnnnnnnnnnnnnnnnnnnnnnnnnnnnnnnnnnnnnnnnnnnnnnnnnnnnnnnnnnnnnnnnnnnnnnnnnnnnnnnnnnnnnnnnnnnnnnnnnnnnnnnnnnnnnnnnnnnnnnnnnnnnnnnnnnnnnnnnnnnnnnnnnnnnnnnnnnnnnnnnnnnnnnnnnnnnnnnnnnnnnnnnnnnnnnnnnnnnnnnnnnnnnnnnnnnnnnnnnnnnnnnnnnnnnnnnnnnnnnnnnnnnnnnnnnnnnnnnnnnnnnnnnnnnnnnnnnnnnnnnnnnnnnnnnnnnnnnnnnnnnnnnnnnnnnnnnnnnnnnnnnnnnnnnnnnnnnnnnnnnnnnnnnnnnnnnnnnnnnnnnnnnnnnnnnnnnnnnnnnnnnnnnnnnnnnnnnnnnnnnnnnnnnnnnnnnnnnnnnnnnnnnnnnnnnnnnnnnnnnnnnnnnnnnnnnnnnnnnnnnnnnnnnnnnnnnnnnnnnnnnnnnnnnnnnnnnnnnnnnnnnnnnnnnnnnnnnnnnnnnnnnnnnnnnnnnnnnnnnnnnnnnnnnnnnnnnnnnnnnnnnnnnnnnnnnnnnnnnnnnnnnnnnnnnnnnnnnnnnnnnnnnnnnnnnnnnnnnnnnnnnnnnnnnnnnnnnnnnnnnnnnnnnnnnnnnnnnnnnnnnnnnnnnnnnnnnnnnnnnnnnnnnnnnnnnnnnnnnnnnnnnnnnnnnnnnnnnnnnnnnnnnnnnnnnnnnnnnnnnnnnnnnnnnnnnnnnnnnnnnnnnnnnnnnnnnnnnnnnnnnnnnnnnnnnnnnnnnnnnnnnnnnnnnnnnnnnnnnnnnnnnnnnnnnnnnnnnnnnnnnnnnnnnnnnnnnnnnnnnnnnnnnnnnnnnnnnnnnnnnnnnnnnnnnnnnnnnnnnnnnnnnnnnnnnnnnnnnnnnnnnnnnnnnnnnnnnnnnnnnnnnnnnnnnnnnnnnnnnnnnnnnnnnnnnnnnnnnnnnnnnnnnnnnnnnnnnnnnnnnnnnnnnnnnnnnnnnnnnnnnnnnnnnnnnnnnnnnnnnnnnnnnnnnnnnnnnnnnnnnnnnnnnnnnnnnnnnnnnnnnnnnnnnnnnnnnnnnnnnnnnnnnnnnnnnnnnnnnnnnnnnnnnnnnnnnnnnnnnnnnnnnnnnnnnnnnnnnnnnnnnnnnnnnnnnnnnnnnnnnnnnnnnnnnnnnnnnnnnnnnnnnnnnnnnnnnnnnnnnnnnnnnnnnnnnnnnnnnnnnnnnnnnnnnnnnnnnnnnnnnnnnnnnnnnnnnnnnnnnnnnnnnnnnnnnnnnnnnnnnnnnnnnnnnnnnnnnnnnnnnnnnnnnnnnnnnnnnnnnnnnnnnnnnnnnnnnnnnnnnnnnnnnnnnnnnnnnnnnnnnnnnnnnnnnnnnnnnnnnnnnnnnnnnnnnnnnnnnnnnnnnnnnnnnnnnnnnnnnnnnnnnnnnnnnnnnnnnnnnnnnnnnnnnnnnnnnnnnnnnnnnnnnnnnnnnnnnnnnnnnnnnnnnnnnnnnnnnnnnnnnnnnnnnnnnnnnnnnnnnnnnnnnnnnnnnnnnnnnnnnnnnnnnnnnnnnnnnnnnnnnnnnnnnnnnnnnnnnnnnnnnnnnnnnnnnnnnnnnnnnnnnnnnnnnnnnnnnnnnnnnnnnnnnnnnnnnnnnnnnnnnnnnnnnnnnnnnnnnnnnnnnnnnnnnnnnnnnnnnnnnnnnnnnnnnnnnnnnnnnnnnnnnnnnnnnnnnnnnnnnnnnnnnnnnnnnnnnnnnnnnnnnnnnnnnnnnnnnnnnnnnnnnnnnnnnnnnnnnnnnnnnnnnnnnnnnnnnnnnnnnnnnnnnnnnnnnnnnnnnnnnnnnnnnnnnnnnnnnnnnnnnnnnnnnnnnnnnnnnnnnnnnnnnnnnnnnnnnnnnnnnnnnnnnnnnnnnnnnnnnnnnnnnnnnnnnnnnnnnnnnnnnnnnnnnnnnnnnnnnnnnnnnnnnnnnnnnnnnnnnnnnnnnnnnnnnnnnnnnnnnnnnnnnnnnnnnnnnnnnnnnnnnnnnnnnnnnnnnnnnnnnnnnnnnnnnnnnnnnnnnnnnnnnnnnnnnnnnnnnnnnnnnnnnnnnnnnnnnnnnnnnnnnnnnnnnnnnnnnnnnnnnnnnnnnnnnnnnnnnnnnnnnnnnnnnnnnnnnnnnnnnnnnnnnnnnnnnnnnnnnnnnnnnnnnnnnnnnnnnnnnnnnnnnnnnnnnnnnnnnnnnnnnnnnnnnnnnnnnnnnnnnnnnnnnnnnnnnnnnnnnnnnnnnnnnnnnnnnnnnnnnnnnnnnnnnnnnnnnnnnnnnnnnnnnnnnnnnnnnnnnnnnnnnnnnnnnnnnnnnnnnnnnnnnnnnnnnnnnnnnnnnnnnnnnnnnnnnnnnnnnnnnnnnnnnnnnnnnnnnnnnnnnnnnnnnnnnnnnnnnnnnnnnnnnnnnnnnnnnnnnnnnnnnnnnnnnnnnnnnnnnnnnnnnnnnnnnnnnnnnnnnnnnnnnnnnnnnnnnnnnnnnnnnnnnnnnnnnnnnnnnnnnnnnnnnnnnnnnnnnnnnnnnnnnnnnnnnnnnnnnnnnnnnnnnnnnnnnnnnnnnnnnnnnnnnnnnnnnnnnnnnnnnnnnnnnnnnnnnnnnnnnnnnnnnnnnnnnnnnnnnnnnnnnnnnnnnnnnnnnnnnnnnnnnnnnnnnnnnnnnnnnnnnnnnnnnnnnnnnnnnnnnnnnnnnnnnnnnnnnnnnnnnnnnnnnnnnnnnnnnnnnnnnnnnnnnnnnnnnnnnnnnnnnnnnnnnnnnnnnnnnnnnnnnnnnnnnnnnnnnnnnnnnnnnnnnnnnnnnnnnnnnnnnnnnnnnnnnnnnnnnnnnnnnnnnnnnnnnnnnnnnnnnnnnnnnnnnnnnnnnnnnnnnnnnnnnnnnnnnnnnnnnnnnnnnnnnnnnnnnnnnnnnnnnnnnnnnnnnnnnnnnnnnnnnnnnnnnnnnnnnnnnnnnnnnnnnnnnnnnnnnnnnnnnnnnnnnnnnnnnnnnnnnnnnnnnnnnnnnnnnnnnnnnnnnnnnnnnnnnnnnnnnnnnnnnnnnnnnnnnnnnnnnnnnnnnnnnnnnnnnnnnnnnnnnnnnnnnnnnnnnnnnnnnnnnnnnnnnnnnnnnnnnnnnnnnnnnnnnnnnnnnnnnnnnnnnnnnnnnnnnnnnnnnnnnnnnnnnnnnnnnnnnnnnnnnnnnnnnnnnnnnnnnnnnnnnnnnnnnnnnnnnnnnnnnnnnnnnnnnnnnnnnnnnnnnnnnnnnnnnnnnnnnnnnnnnnnnnnnnnnnnnnnnnnnnnnnnnnnnnnnnnnnnnnnnnnnnnnnnnnnnnnnnnnnnnnnnnnnnnnnnnnnnnnnnnnnnnnnnnnnnnnnnnnnnnnnnnnnnnnnnnnnnnnnnnnnnnnnnnnnnnnnnnnnnnnnnnnnnnnnnnnnnnnnnnnnnnnnnnnnnnnnnnnnnnnnnnnnnnnnnnnnnnnnnnnnnnnnnnnnnnnnnnnnnnnnnnnnnnnnnnnnnnnnnnnnnnnnnnnnnnnnnnnnnnnnnnnnnnnnnnnnnnnnnnnnnnnnnnnnnnnnnnnnnnnnnnnnnnnnnnnnnnnnnnnnnnnnnnnnnnnnnnnnnnnnnnnnnnnnnnnnnnnnnnnnnnnnnnnnnnnnnnnnnnnnnnnnnnnnnnnnnnnnnnnnnnnnnnnnnnnnnnnnnnnnnnnnnnnnnnnnnnnnnnnnnnnnnnnnnnnnnnnnnnnnnnnnnnnnnnnnnnnnnnnnnnnnnnnnnnnnnnnnnnnnnnnnnnnnnnnnnnnnnnnnnnnnnnnnnnnnnnnnnnnnnnnnnnnnnnnnnnnnnnnnnnnnnnnnnnnnnnnnnnnnnnnnnnnnnnnnnnnnnnnnnnnnnnnnnnnnnnnnnnnnnnnnnnnnnnnnnnnnnnnnnnnnnnnnnnnnnnnnnnnnnnnnnnnnnnnnnnnnnnnnnnnnnnnnnnnnnnnnnnnnnnnnnnnnnnnnnnnnnnnnnnnnnnnnnnnnnnnnnnnnnnnnnnnnnnnnnnnnnnnnnnnnnnnnnnnnnnnnnnnnnnnnnnnnnnnnnnnnnnnnnnnnnnnnnnnnnnnnnnnnnnnnnnnnnnnnnnnnnnnnnnnnnnnnnnnnnnnnnnnnnnnnnnnnnnnnnnnnnnnnnnnnnnnnnnnnnnnnnnnnnnnnnnnnnnnnnnnnnnnnnnnnnnnnnnnnnnnnnnnnnnnnnnnnnnnnnnnnnnnnnnnnnnnnnnnnnnnnnnnnnnnnnnnnnnnnnnnnnnnnnnnnnnnnnnnnnnnnnnnnnnnnnnnnnnnnnnnnnnnnnnnnnnnnnnnnnnnnnnnnnnnnnnnnnnnnnnnnnnnnnnnnnnnnnnnnnnnnnnnnnnnnnnnnnnnnnnnnnnnnnnnnnnnnnnnnnnnnnnnnnnnnnnnnnnnnnnnnnnnnnnnnnnnnnnnnnnnnnnnnnnnnnnnnnnnnnnnnnnnnnnnnnnnnnnnnnnnnnnnnnnnnnnnnnnnnnnnnnnnnnnnnnnnnnnnnnnnnnnnnnnnnnnnnnnnnnnnnnnnnnnnnnnnnnnnnnnnnnnnnnnnnnnnnnnnnnnnnnnnnnnnnnnnnnnnnnnnnnnnnnnnnnnnnnnnnnnnnnnnnnnnnnnnnnnnnnnnnnnnnnnnnnnnnnnnnnnnnnnnnnnnnnnnnnnnnnnnnnnnnnnnnnnnnnnnnnnnnnnnnnnnnnnnnnnnnnnnnnnnnnnnnnnnnnnnnnnnnnnnnnnnnnnnnnnnnnnnnnnnnnnnnnnnnnnnnnnnnnnnnnnnnnnnnnnnnnnnnnnnnnnnnnnnnnnnnnnnnnnnnnnnnnnnnnnnnnnnnnnnnnnnnnnnnnnnnnnnnnnnnnnnnnnnnnnnnnnnnnnnnnnnnnnnnnnnnnnnnnnnnnnnnnnnnnnnnnnnnnnnnnnnnnnnnnnnnnnnnnnnnnnnnnnnnnnnnnnnnnnnnnnnnnnnnnnnnnnnnnnnnnnnnnnnnnnnnnnnnnnnnnnnnnnnnnnnnnnnnnnnnnnnnnnnnnnnnnnnnnnnnnnnnnnnnnnnnnnnnnnnnnnnnnnnnnnnnnnnnnnnnnnnnnnnnnnnnnnnnnnnnnnnnnnnnnnnnnnnnnnnnnnnnnnnnnnnnnnnnnnnnnnnnnnnnnnnnnnnnnnnnnnnnnnnnnnnnnnnnnnnnnnnnnnnnnnnnnnnnnnnnnnnnnnnnnnnnnnnnnnnnnnnnnnnnnnnnnnnnnnnnnnnnnnnnnnnnnnnnnnnnnnnnnnnnnnnnnnnnnnnnnnnnnnnnnnnnnnnnnnnnnnnnnnnnnnnnnnnnnnnnnnnnnnnnnnnnnnnnnnnnnnnnnnnnnnnnnnnnnnnnnnnnnnnnnnnnnnnnnnnnnnnnnnnnnnnnnnnnnnnnnnnnnnnnnnnnnnnnnnnnnnnnnnnnnnnnnnnnnnnnnnnnnnnnnnnnnnnnnnnnnnnnnnnnnnnnnnnnnnnnnnnnnnnnnnnnnnnnnnnnnnnnnnnnnnnnnnnnnnnnnnnnnnnnnnnnnnnnnnnnnnnnnnnnnnnnnnnnnnnnnnnnnnnnnnnnnnnnnnnnnnnnnnnnnnnnnnnnnnnnnnnnnnnnnnnnnnnnnnnnnnnnnnnnnnnnnnnnnnnnnnnnnnnnnnnnnnnnnnnnnnnnnnnnnnnnnnnnnnnnnnnnnnnnnnnnnnnnnnnnnnnnnnnnnnnnnnnnnnnnnnnnnnnnnnnnnnnnnnnnnnnnnnnnnnnnnnnnnnnnnnnnnnnnnnnnnnnnnnnnnnnnnnnnnnnnnnnnnnnnnnnnnnnnnnnnnnnnnnnnnnnnnnnnnnnnnnnnnnnnnnnnnnnnnnnnnnnnnnnnnnnnnnnnnnnnnnnnnnnnnnnnnnnnnnnnnnnnnnnnnnnnnnnnnnnnnnnnnnnnnnnnnnnnnnnnnnnnnnnnnnnnnnnnnnnnnnnnnnnnnnnnnnnnnnnnnnnnnnnnnnnnnnnnnnnnnnnnnnnnnnnnnnnnnnnnnnnnnnnnnnnnnnnnnnnnnnnnnnnnnnnnnnnnnnnnnnnnnnnnnnnnnnnnnnnnnnnnnnnnnnnnnnnnnnnnnnnnnnnnnnnnnnnnnnnnnnnnnnnnnnnnnnnnnnnnnnnnnnnnnnnnnnnnnnnnnnnnnnnnnnnnnnnnnnnnnnnnnnnnnnnnnnnnnnnnnnnnnnnnnnnnnnnnnnnnnnnnnnnnnnnnnnnnnnnnnnnnnnnnnnnnnnnnnnnnnnnnnnnnnnnnnnnnnnnnnnnnnnnnnnnnnnnnnnnnnnnnnnnnnnnnnnnnnnnnnnnnnnnnnnnnnnnnnnnnnnnnnnnnnnnnnnnnnnnnnnnnnnnnnnnnnnnnnnnnnnnnnnnnnnnnnnnnnnnnnnnnnnnnnnnnnnnnnnnnnnnnnnnnnnnnnnnnnnnnnnnnnnnnnnnnnnnnnnnnnnnnnnnnnnnnnnnnnnnnnnnnnnnnnnnnnnnnnnnnnnnnnnnnnnnnnnnnnnnnnnnnnnnnnnnnnnnnnnnnnnnnnnnnnnnnnnnnnnnnnnnnnnnnnnnnnnnnnnnnnnnnnnnnnnnnnnnnnnnnnnnnnnnnnnnnnnnnnnnnnnnnnnnnnnnnnnnnnnnnnnnnnnnnnnnnnnnnnnnnnnnnnnnnnnnnnnnnnnnnnnnnnnnnnnnnnnnnnnnnnnnnnnnnnnnnnnnnnnnnnnnnnnnnnnnnnnnnnnnnnnnnnnnnnnnnnnnnnnnnnnnnnnnnnnnnnnnnnnnnnnnnnnnnnnnnnnnnnnnnnnnnnnnnnnnnnnnnnnnnnnnnnnnnnnnnnnnnnnnnnnnnnnnnnnnnnnnnnnnnnnnnnnnnnnnnnnnnnnnnnnnnnnnnnnnnnnnnnnnnnnnnnnnnnnnnnnnnnnnnnnnnnnnnnnnnnnnnnnnnnnnnnnnnnnnnnnnnnnnnnnnnnnnnnnnnnnnnnnnnnnnnnnnnnnnnnnnnnnnnnnnnnnnnnnnnnnnnnnnnnnnnnnnnnnnnnnnnnnnnnnnnnnnnnnnnnnnnnnnnnnnnnnnnnnnnnnnnnnnnnnnnnnnnnnnnnnnnnnnnnnnnnnnnnnnnnnnnnnnnnnnnnnnnnnnnnnnnnnnnnnnnnnnnnnnnnnnnnnnnnnnnnnnnnnnnnnnnnnnnnnnnnnnnnnnnnnnnnnnnnnnnnnnnnnnnnnnnnnnnnnnnnnnnnnnnnnnnnnnnnnnnnnnnnnnnnnnnnnnnnnnnnnnnnnnnnnnnnnnnnnnnnnnnnnnnnnnnnnnnnnnnnnnnnnnnnnnnnnnnnnnnnnnnnnnnnnnnnnnnnnnnnnnnnnnnnnnnnnnnnnnnnnnnnnnnnnnnnnnnnnnnnnnnnnnnnnnnnnnnnnnnnnnnnnnnnnnnnnnnnnnnnnnnnnnnnnnnnnnnnnnnnnnnnnnnnnnnnnnnnnnnnnnnnnnnnnnnnnnnnnnnnnnnnnnnnnnnnnnnnnnnnnnnnnnnnnnnnnnnnnnnnnnnnnnnnnnnnnnnnnnnnnnnnnnnnnnnnnnnnnnnnnnnnnnnnnnnnnnnnnnnnnnnnnnnnnnnnnnnnnnnnnnnnnnnnnnnnnnnnnnnnnnnnnnnnnnnnnnnnnnnnnnnnnnnnnnnnnnnnnnnnnnnnnnnnnnnnnnnnnnnnnnnnnnnnnnnnnnnnnnnnnnnnnnnnnnnnnnnnnnnnnnnnnnnnnnnnnnnnnnnnnnnnnnnnnnnnnnnnnnnnnnnnnnnnnnnnnnnnnnnnnnnnnnnnnnnnnnnnnnnnnnnnnnnnnnnnnnnnnnnnnnnnnnnnnnnnnnnnnnnnnnnnnnnnnnnnnnnnnnnnnnnnnnnnnnnnnnnnnnnnnnnnnnnnnnnnnnnnnnnnnnnnnnnnnnnnnnnnnnnnnnnnnnnnnnnnnnnnnnnnnnnnnnnnnnnnnnnnnnnnnnnnnnnnnnnnnnnnnnnnnnnnnnnnnnnnnnnnnnnnnnnnnnnnnnnnnnnnnnnnnnnnnnnnnnnnnnnnnnnnnnnnnnnnnnnnnnnnnnnnnnnnnnnnnnnnnnnnnnnnnnnnnnnnnnnnnnnnnnnnnnnnnnnnnnnnnnnnnnnnnnnnnnnnnnnnnnnnnnnnnnnnnnnnnnnnnnnnnnnnnnnnnnnnnnnnnnnnnnnnnnnnnnnnnnnnnnnnnnnnnnnnnnnnnnnnnnnnnnnnnnnnnnnnnnnnnnnnnnnnnnnnnnnnnnnnnnnnnnnnnnnnnnnnnnnnnnnnnnnnnnnnnnnnnnnnnnnnnnnnnnnnnnnnnnnnnnnnnnnnnnnnnnnnnnnnnnnnnnnnnnnnnnnnnnnnnnnnnnnnnnnnnnnnnnnnnnnnnnnnnnnnnnnnnnnnnnnnnnnnnnnnnnnnnnnnnnnnnnnnnnnnnnnnnnnnnnnnnnnnnnnnnnnnnnnnnnnnnnnnnnnnnnnnnnnnnnnnnnnnnnnnnnnnnnnnnnnnnnnnnnnnnnnnnnnnnnnnnnnnnnnnnnnnnnnnnnnnnnnnnnnnnnnnnnnnnnnnnnnnnnnnnnnnnnnnnnnnnnnnnnnnnnnnnnnnnnnnnnnnnnnnnnnnnnnnnnnnnnnnnnnnnnnnnnnnnnnnnnnnnnnnnnnnnnnnnnnnnnnnnnnnnnnnnnnnnnnnnnnnnnnnnnnnnnnnnnnnnnnnnnnnnnnnnnnnnnnnnnnnnnnnnnnnnnnnnnnnnnnnnnnnnnnnnnnnnnnnnnnnnnnnnnnnnnnnnnnnnnnnnnnnnnnnnnnnnnnnnnnnnnnnnnnnnnnnnnnnnnnnnnnnnnnnnnnnnnnnnnnnnnnnnnnnnnnnnnnnnnnnnnnnnnnnnnnnnnnnnnnnnnnnnnnnnnnnnnnnnnnnnnnnnnnnnnnnnnnnnnnnnnnnnnnnnnnnnnnnnnnnnnnnnnnnnnnnnnnnnnnnnnnnnnnnnnnnnnnnnnnnnnnnnnnnnnnnnnnnnnnnnnnnnnnnnnnnnnnnnnnnnnnnnnnnnnnnnnnnnnnnnnnnnnnnnnnnnnnnnnnnnnnnnnnnnnnnnnnnnnnnnnnnnnnnnnnnnnnnnnnnnnnnnnnnnnnnnnnnnnnnnnnnnnnnnnnnnnnnnnnnnnnnnnnnnnnnnnnnnnnnnnnnnnnnnnnnnnnnnnnnnnnnnnnnnnnnnnnnnnnnnnnnnnnnnnnnnnnnnnnnnnnnnnnnnnnnnnnnnnnnnnnnnnnnnnnnnnnnnnnnnnnnnnnnnnnnnnnnnnnnnnnnnnnnnnnnnnnnnnnnnnnnnnnnnnnnnnnnnnnnnnnnnnnnnnnnnnnnnnnnnnnnnnnnnnnnnnnnnnnnnnnnnnnnnnnnnnnnnnnnnnnnnnnnnnnnnnnnnnnnnnnnnnnnnnnnnnnnnnnnnnnnnnnnnnnnnnnnnnnnnnnnnnnnnnnnnnnnnnnnnnnnnnnnnnnnnnnnnnnnnnnnnnnnnnnnnnnnnnnnnnnnnnnnnnnnnnnnnnnnnnnnnnnnnnnnnnnnnnnnnnnnnnnnnnnnnnnnnnnnnnnnnnnnnnnnnnnnnnnnnnnnnnnnnnnnnnnnnnnnnnnnnnnnnnnnnnnnnnnnnnnnnnnnnnnnnnnnnnnnnnnnnnnnnnnnnnnnnnnnnnnnnnnnnnnnnnnnnnnnnnnnnnnnnnnnnnnnnnnnnnnnnnnnnnnnnnnnnnnnnnnnnnnnnnnnnnnnnnnnnnnnnnnnnnnnnnnnnnnnnnnnnnnnnnnnnnnnnnnnnnnnnnnnnnnnnnnnnnnnnnnnnnnnnnnnnnnnnnnnnnnnnnnnnnnnnnnnnnnnnnnnnnnnnnnnnnnnnnnnnnnnnnnnnnnnnnnnnnnnnnnnnnnnnnnnnnnnnnnnnnnnnnnnnnnnnnnnnnnnnnnnnnnnnnnnnnnnnnnnnnnnnnnnnnnnnnnnnnnnnnnnnnnnnnnnnnnnnnnnnnnnnnnnnnnnnnnnnnnnnnnnnnnnnnnnnnnnnnnnnnnnnnnnnnnnnnnnnnnnnnnnnnnnnnnnnnnnnnnnnnnnnnnnnnnnnnnnnnnnnnnnnnnnnnnnnnnnnnnnnnnnnnnnnnnnnnnnnnnnnnnnnnnnnnnnnnnnnnnnnnnnnnnnnnnnnnnnnnnnnnnnnnnnnnnnnnnnnnnnnnnnnnnnnnnnnnnnnnnnnnnnnnnnnnnnnnnnnnnnnnnnnnnnnnnnnnnnnnnnnnnnnnnnnnnnnnnnnnnnnnnnnnnnnnnnnnnnnnnnnnnnnnnnnnnnnnnnnnnnnnnnnnnnnnnnnnnnnnnnnnnnnnnnnnnnnnnnnnnnnnnnnnnnnnnnnnnnnnnnnnnnnnnnnnnnnnnnnnnnnnnnnnnnnnnnnnnnnnnnnnnnnnnnnnnnnnnnnnnnnnnnnnnnnnnnnnnnnnnnnnnnnnnnnnnnnnnnnnnnnnnnnnnnnnnnnnnnnnnnnnnnnnnnnnnnnnnnnnnnnnnnnnnnnnnnnnnnnnnnnnnnnnnnnnnnnnnnnnnnnnnnnnnnnnnnnnnnnnnnnnnnnnnnnnnnnnnnnnnnnnnnnnnnnnnnnnnnnnnnnnnnnnnnnnnnnnnnnnnnnnnnnnnnnnnnnnnnnnnnnnnnnnnnnnnnnnnnnnnnnnnnnnnnnnnnnnnnnnnnnnnnnnnnnnnnnnnnnnnnnnnnnnnnnnnnnnnnnnnnnnnnnnnnnnnnnnnnnnnnnnnnnnnnnnnnnnnnnnnnnnnnnnnnnnnnnnnnnnnnnnnnnnnnnnnnnnnnnnnnnnnnnnnnnnnnnnnnnnnnnnnnnnnnnnnnnnnnnnnnnnnnnnnnnnnnnnnnnnnnnnnnnnnnnnnnnnnnnnnnnnnnnnnnnnnnnnnnnnnnnnnnnnnnnnnnnnnnnnnnnnnnnnnnnnnnnnnnnnnnnnnnnnnnnnnnnnnnnnnnnnnnnnnnnnnnnnnnnnnnnnnnnnnnnnnnnnnnnnnnnnnnnnnnnnnnnnnnnnnnnnnnnnnnnnnnnnnnnnnnnnnnnnnnnnnnnnnnnnnnnnnnnnnnnnnnnnnnnnnnnnnnnnnnnnnnnnnnnnnnnnnnnnnnnnnnnnnnnnnnnnnnnnnnnnnnnnnnnnnnnnnnnnnnnnnnnnnnnnnnnnnnnnnnnnnnnnnnnnnnnnnnnnnnnnnnnnnnnnnnnnnnnnnnnnnnnnnnnnnnnnnnnnnnnnnnnnnnnnnnnnnnnnnnnnnnnnnnnnnnnnnnnnnnnnnnnnnnnnnnnnnnnnnnnnnnnnnnnnnnnnnnnnnnnnnnnnnnnnnnnnnnnnnnnnnnnnnnnnnnnnnnnnnnnnnnnnnnnnnnnnnnnnnnnnnnnnnnnnnnnnnnnnnnnnnnnnnnnnnnnnnnnnnnnnnnnnnnnnnnnnnnnnnnnnnnnnnnnnnnnnnnnnnnnnnnnnnnnnnnnnnnnnnnnnnnnnnnnnnnnnnnnnnnnnnnnnnnnnnnnnnnnnnnnnnnnnnnnnnnnnnnnnnnnnnnnnnnnnnnnnnnnnnnnnnnnnnnnnnnnnnnnnnnnnnnnnnnnnnnnnnnnnnnnnnnnnnnnnnnnnnnnnnnnnnnnnnnnnnnnnnnnnnnnnnnnnnnnnnnnnnnnnnnnnnnnnnnnnnnnnnnnnnnnnnnnnnnnnnnnnnnnnnnnnnnnnnnnnnnnnnnnnnnnnnnnnnnnnnnnnnnnnnnnnnnnnnnnnnnnnnnnnnnnnnnnnnnnnnnnnnnnnnnnnnnnnnnnnnnnnnnnnnnnnnnnnnnnnnnnnnnnnnnnnnnnnnnnnnnnnnnnnnnnnnnnnnnnnnnnnnnnnnnnnnnnnnnnnnnnnnnnnnnnnnnnnnnnnnnnnnnnnnnnnnnnnnnnnnnnnnnnnnnnnnnnnnnnnnnnnnnnnnnnnnnnnnnnnnnnnnnnnnnnnnnnnnnnnnnnnnnnnnnnnnnnnnnnnnnnnnnnnnnnnnnnnnnnnnnnnnnnnnnnnnnnnnnnnnnnnnnnnnnnnnnnnnnnnnnnnnnnnnnnnnnnnnnnnnnnnnnnnnnnnnnnnnnnnnnnnnnnnnnnnnnnnnnnnnnnnnnnnnnnnnnnnnnnnnnnnnnnnnnnnnnnnnnnnnnnnnnnnnnnnnnnnnnnnnnnnnnnnnnnnnnnnnnnnnnnnnnnnnnnnnnnnnnnnnnnnnnnnnnnnnnnnnnnnnnnnnnnnnnnnnnnnnnnnnnnnnnnnnnnnnnnnnnnnnnnnnnnnnnnnnnnnnnnnnnnnnnnnnnnnnnnnnnnnnnnnnnnnnnnnnnnnnnnnnnnnnnnnnnnnnnnnnnnnnnnnnnnnnnnnnnnnnnnnnnnnnnnnnnnnnnnnnnnnnnnnnnnnnnnnnnnnnnnnnnnnnnnnnnnnnnnnnnnnnnnnnnnnnnnnnnnnnnnnnnnnnnnnnnnnnnnnnnnnnnnnnnnnnnnnnnnnnnnnnnnnnnnnnnnnnnnnnnnnnnnnnnnnnnnnnnnnnnnnnnnnnnnnnnnnnnnnnnnnnnnnnnnnnnnnnnnnnnnnnnnnnnnnnnnnnnnnnnnnnnnnnnnnnnnnnnnnnnnnnnnnnnnnnnnnnnnnnnnnnnnnnnnnnnnnnnnnnnnnnnnnnnnnnnnnnnnnnnnnnnnnnnnnnnnnnnnnnnnnnnnnnnnnnnnnnnnnnnnnnnnnnnnnnnnnnnnnnnnnnnnnnnnnnnnnnnnnnnnnnnnnnnnnnnnnnnnnnnnnnnnnnnnnnnnnnnnnnnnnnnnnnnnnnnnnnnnnnnnnnnnnnnnnnnnnnnnnnnnnnnnnnnnnnnnnnnnnnnnnnnnnnnnnnnnnnnnnnnnnnnnnnnnnnnnnnnnnnnnnnnnnnnnnnnnnnnnnnnnnnnnnnnnnnnnnnnnnnnnnnnnnnnnnnnnnnnnnnnnnnnnnnnnnnnnnnnnnnnnnnnnnnnnnnnnnnnnnnnnnnnnnnnnnnnnnnnnnnnnnnnnnnnnnnnnnnnnnnnnnnnnnnnnnnnnnnnnnnnnnnnnnnnnnnnnnnnnnnnnnnnnnnnnnnnnnnnnnnnnnnnnnnnnnnnnnnnnnnnnnnnnnnnnnnnnnnnnnnnnnnnnnnnnnnnnnnnnnnnnnnnnnnnnnnnnnnnnnnnnnnnnnnnnnnnnnnnnnnnnnnnnnnnnnnnnnnnnnnnnnnnnnnnnnnnnnnnnnnnnnnnnnnnnnnnnnnnnnnnnnnnnnnnnnnnnnnnnnnnnnnnnnnnnnnnnnnnnnnnnnnnnnnnnnnnnnnnnnnnnnnnnnnnnnnnnnnnnnnnnnnnnnnnnnnnnnnnnnnnnnnnnnnnnnnnnnnnnnnnnnnnnnnnnnnnnnnnnnnnnnnnnnnnnnnnnnnnnnnnnnnnnnnnnnnnnnnnnnnnnnnnnnnnnnnnnnnnnnnnnnnnnnnnnnnnnnnnnnnnnnnnnnnnnnnnnnnnnnnnnnnnnnnnnnnnnnnnnnnnnnnnnnnnnnnnnnnnnnnnnnnnnnnnnnnnnnnnnnnnnnnnnnnnnnnnnnnnnnnnnnnnnnnnnnnnnnnnnnnnnnnnnnnnnnnnnnnnnnnnnnnnnnnnnnnnnnnnnnnnnnnnnnnnnnnnnnnnnnnnnnnnnnnnnnnnnnnnnnnnnnnnnnnnnnnnnnnnnnnnnnnnnnnnnnnnnnnnnnnnnnnnnnnnnnnnnnnnnnnnnnnnnnnnnnnnnnnnnnnnnnnnnnnnnnnnnnnnnnnnnnnnnnnnnnnnnnnnnnnnnnnnnnnnnnnnnnnnnnnnnnnnnnnnnnnnnnnnnnnnnnnnnnnnnnnnnnnnnnnnnnnnnnnnnnnnnnnnnnnnnnnnnnnnnnnnnnnnnnnnnnnnnnnnnnnnnnnnnnnnnnnnnnnnnnnnnnnnnnnnnnnnnnnnnnnnnnnnnnnnnnnnnnnnnnnnnnnnnnnnnnnnnnnnnnnnnnnnnnnnnnnnnnnnnnnnnnnnnnnnnnnnnnnnnnnnnnnnnnnnnnnnnnnnnnnnnnnnnnnnnnnnnnnnnnnnnnnnnnnnnnnnnnnnnnnnnnnnnnnnnnnnnnnnnnnnnnnnnnnnnnnnnnnnnnnnnnnnnnnnnnnnnnnnnnnnnnnnnnnnnnnnnnnnnnnnnnnnnnnnnnnnnnnnnnnnnnnnnnnnnnnnnnnnnnnnnnnnnnnnnnnnnnnnnnnnnnnnnnnnnnnnnnnnnnnnnnnnnnnnnnnnnnnnnnnnnnnnnnnnnnnnnnnnnnnnnnnnnnnnnnnnnnnnnnnnnnnnnnnnnnnnnnnnnnnnnnnnnnnnnnnnnnnnnnnnnnnnnnnnnnnnnnnnnnnnnnnnnnnnnnnnnnnnnnnnnnnnnnnnnnnnnnnnnnnnnnnnnnnnnnnnnnnnnnnnnnnnnnnnnnnnnnnnnnnnnnnnnnnnnnnnnnnnnnnnnnnnnnnnnnnnnnnnnnnnnnnnnnnnnnnnnnnnnnnnnnnnnnnnnnnnnnnnnnnnnnnnnnnnnnnnnnnnnnnnnnnnnnnnnnnnnnnnnnnnnnnnnnnnnnnnnnnnnnnnnnnnnnnnnnnnnnnnnnnnnnnnnnnnnnnnnnnnnnnnnnnnnnnnnnnnnnnnnnnnnnnnnnnnnnnnnnnnnnnnnnnnnnnnnnnnnnnnnnnnnnnnnnnnnnnnnnnnnnnnnnnnnnnnnnnnnnnnnnnnnnnnnnnnnnnnnnnnnnnnnnnnnnnnnnnnnnnnnnnnnnnnnnnnnnnnnnnnnnnnnnnnnnnnnnnnnnnnnnnnnnnnnnnnnnnnnnnnnnnnnnnnnnnnnnnnnnnnnnnnnnnnnnnnnnnnnnnnnnnnnnnnnnnnnnnnnnnnnnnnnnnnnnnnnnnnnnnnnnnnnnnnnnnnnnnnnnnnnnnnnnnnnnnnnnnnnnnnnnnnnnnnnnnnnnnnnnnnnnnnnnnnnnnnnnnnnnnnnnnnnnnnnnnnnnnnnnnnnnnnnnnnnnnnnnnnnnnnnnnnnnnnnnnnnnnnnnnnnnnnnnnnnnnnnnnnnnnnnnnnnnnnnnnnnnnnnnnnnnnnnnnnnnnnnnnnnnnnnnnnnnnnnnnnnnnnnnnnnnnnnnnnnnnnnnnnnnnnnnnnnnnnnnnnnnnnnnnnnnnnnnnnnnnnnnnnnnnnnnnnnnnnnnnnnnnnnnnnnnnnnnnnnnnnnnnnnnnnnnnnnnnnnnnnnnnnnnnnnnnnnnnnnnnnnnnnnnnnnnnnnnnnnnnnnnnnnnnnnnnnnnnnnnnnnnnnnnnnnnnnnnnnnnnnnnnnnnnnnnnnnnnnnnnnnnnnnnnnnnnnnnnnnnnnnnnnnnnnnnnnnnnnnnnnnnnnnnnnnnnnnnnnnnnnnnnnnnnnnnnnnnnnnnnnnnnnnnnnnnnnnnnnnnnnnnnnnnnnnnnnnnnnnnnnnnnnnnnnnnnnnnnnnnnnnnnnnnnnnnnnnnnnnnnnnnnnnnnnnnnnnnnnnnnnnnnnnnnnnnnnnnnnnnnnnnnnnnnnnnnnnnnnnnnnnnnnnnnnnnnnnnnnnnnnnnnnnnnnnnnnnnnnnnnnnnnnnnnnnnnnnnnnnnnnnnnnnnnnnnnnnnnnnnnnnnnnnnnnnnnnnnnnnnnnnnnnnnnnnnnnnnnnnnnnnnnnnnnnnnnnnnnnnnnnnnnnnnnnnnnnnnnnnnnnnnnnnnnnnnnnnnnnnnnnnnnnnnnnnnnnnnnnnnnnnnnnnnnnnnnnnnnnnnnnnnnnnnnnnnnnnnnnnnnnnnnnnnnnnnnnnnnnnnnnnnnnnnnnnnnnnnnnnnnnnnnnnnnnnnnnnnnnnnnnnnnnnnnnnnnnnnnnnnnnnnnnnnnnnnnnnnnnnnnnnnnnnnnnnnnnnnnnnnnnnnnnnnnnnnnnnnnnnnnnnnnnnnnnnnnnnnnnnnnnnnnnnnnnnnnnnnnnnnnnnnnnnnnnnnnnnnnnnnnnnnnnnnnnnnnnnnnnnnnnnnnnnnnnnnnnnnnnnnnnnnnnnnnnnnnnnnnnnnnnnnnnnnnnnnnnnnnnnnnnnnnnnnnnnnnnnnnnnnnnnnnnnnnnnnnnnnnnnnnnnnnnnnnnnnnnnnnnnnnnnnnnnnnnnnnnnnnnnnnnnnnnnnnnnnnnnnnnnnnnnnnnnnnnnnnnnnnnnnnnnnnnnnnnnnnnnnnnnnnnnnnnnnnnnnnnnnnnnnnnnnnnnnnnnnnnnnnnnnnnnnnnnnnnnnnnnnnnnnnnnnnnnnnnnnnnnnnnnnnnnnnnnnnnnnnnnnnnnnnnnnnnnnnnnnnnnnnnnnnnnnnnnnnnnnnnnnnnnnnnnnnnnnnnnnnnnnnnnnnnnnnnnnnnnnnnnnnnnnnnnnnnnnnnnnnnnnnnnnnnnnnnnnnnnnnnnnnnnnnnnnnnnnnnnnnnnnnnnnnnnnnnnnnnnnnnnnnnnnnnnnnnnnnnnnnnnnnnnnnnnnnnnnnnnnnnnnnnnnnnnnnnnnnnnnnnnnnnnnnnnnnnnnnnnnnnnnnnnnnnnnnnnnnnnnnnnnnnnnnnnnnnnnnnnnnnnnnnnnnnnnnnnnnnnnnnnnnnnnnnnnnnnnnnnnnnnnnnnnnnnnnnnnnnnnnnnnnnnnnnnnnnnnnnnnnnnnnnnnnnnnnnnnnnnnnnnnnnnnnnnnnnnnnnnnnnnnnnnnnnnnnnnnnnnnnnnnnnnnnnnnnnnnnnnnnnnnnnnnnnnnnnnnnnnnnnnnnnnnnnnnnnnnnnnnnnnnnnnnnnnnnnnnnnnnnnnnnnnnnnnnnnnnnnnnnnnnnnnnnnnnnnnnnnnnnnnnnnnnnnnnnnnnnnnnnnnnnnnnnnnnnnnnnnnnnnnnnnnnnnnnnnnnnnnnnnnnnnnnnnnnnnnnnnnnnnnnnnnnnnnnnnnnnnnnnnnnnnnnnnnnnnnnnnnnnnnnnnnnnnnnnnnnnnnnnnnnnnnnnnnnnnnnnnnnnnnnnnnnnnnnnnnnnnnnnnnnnnnnnnnnnnnnnnnnnnnnnnnnnnnnnnnnnnnnnnnnnnnnnnnnnnnnnnnnnnnnnnnnnnnnnnnnnnnnnnnnnnnnnnnnnnnnnnnnnnnnnnnnnnnnnnnnnnnnnnnnnnnnnnnnnnnnnnnnnnnnnnnnnnnnnnnnnnnnnnnnnnnnnnnnnnnnnnnnnnnnnnnnnnnnnnnnnnnnnnnnnnnnnnnnnnnnnnnnnnnnnnnnnnnnnnnnnnnnnnnnnnnnnnnnnnnnnnnnnnnnnnnnnnnnnnnnnnnnnnnnnnnnnnnnnnnnnnnnnnnnnnnnnnnnnnnnnnnnnnnnnnnnnnnnnnnnnnnnnnnnnnnnnnnnnnnnnnnnnnnnnnnnnnnnnnnnnnnnnnnnnnnnnnnnnnnnnnnnnnnnnnnnnnnnnnnnnnnnnnnnnnnnnnnnnnnnnnnnnnnnnnnnnnnnnnnnnnnnnnnnnnnnnnnnnnnnnnnnnnnnnnnnnnnnnnnnnnnnnnnnnnnnnnnnnnnnnnnnnnnnnnnnnnnnnnnnnnnnnnnnnnnnnnnnnnnnnnnnnnnnnnnnnnnnnnnnnnnnnnnnnnnnnnnnnnnnnnnnnnnnnnnnnnnnnnnnnnnnnnnnnnnnnnnnnnnnnnnnnnnnnnnnnnnnnnnnnnnnnnnnnnnnnnnnnnnnnnnnnnnnnnnnnnnnnnnnnnnnnnnnnnnnnnnnnnnnnnnnnnnnnnnnnnnnnnnnnnnnnnnnnnnnnnnnnnnnnnnnnnnnnnnnnnnnnnnnnnnnnnnnnnnnnnnnnnnnnnnnnnnnnnnnnnnnnnnnnnnnnnnnnnnnnnnnnnnnnnnnnnnnnnnnnnnnnnnnnnnnnnnnnnnnnnnnnnnnnnnnnnnnnnnnnnnnnnnnnnnnnnnnnnnnnnnnnnnnnnnnnnnnnnnnnnnnnnnnnnnnnnnnnnnnnnnnnnnnnnnnnnnnnnnnnnnnnnnnnnnnnnnnnnnnnnnnnnnnnnnnnnnnnnnnnnnnnnnnnnnnnnnnnnnnnnnnnnnnnnnnnnnnnnnnnnnnnnnnnnnnnnnnnnnnnnnnnnnnnnnnnnnnnnnnnnnnnnnnnnnnnnnnnnnnnnnnnnnnnnnnnnnnnnnnnnnnnnnnnnnnnnnnnnnnnnnnnnnnnnnnnnnnnnnnnnnnnnnnnnnnnnnnnnnnnnnnnnnnnnnnnnnnnnnnnnnnnnnnnnnnnnnnnnnnnnnnnnnnnnnnnnnnnnnnnnnnnnnnnnnnnnnnnnnnnnnnnnnnnnnnnnnnnnnnnnnnnnnnnnnnnnnnnnnnnnnnnnnnnnnnnnnnnnnnnnnnnnnnnnnnnnnnnnnnnnnnnnnnnnnnnnnnnnnnnnnnnnnnnnnnnnnnnnnnnnnnnnnnnnnnnnnnnnnnnnnnnnnnnnnnnnnnnnnnnnnnnnnnnnnnnnnnnnnnnnnnnnnnnnnnnnnnnnnnnnnnnnnnnnnnnnnnnnnnnnnnnnnnnnnnnnnnnnnnnnnnnnnnnnnnnnnnnnnnnnnnnnnnnnnnnnnnnnnnnnnnnnnnnnnnnnnnnnnnnnnnnnnnnnnnnnnnnnnnnnnnnnnnnnnnnnnnnnnnnnnnnnnnnnnnnnnnnnnnnnnnnnnnnnnnnnnnnnnnnnnnnnnnnnnnnnnnnnnnnnnnnnnnnnnnnnnnnnnnnnnnnnnnnnnnnnnnnnnnnnnnnnnnnnnnnnnnnnnnnnnnnnnnnnnnnnnnnnnnnnnnnnnnnnnnnnnnnnnnnnnnnnnnnnnnnnnnnnnnnnnnnnnnnnnnnnnnnnnnnnnnnnnnnnnnnnnnnnnnnnnnnnnnnnnnnnnnnnnnnnnnnnnnnnnnnnnnnnnnnnnnnnnnnnnnnnnnnnnnnnnnnnnnnnnnnnnnnnnnnnnnnnnnnnnnnnnnnnnnnnnnnnnnnnnnnnnnnnnnnnnnnnnnnnnnnnnnnnnnnnnnnnnnnnnnnnnnnnnnnnnnnnnnnnnnnnnnnnnnnnnnnnnnnnnnnnnnnnnnnnnnnnnnnnnnnnnnnnnnnnnnnnnnnnnnnnnnnnnnnnnnnnnnnnnnnnnnnnnnnnnnnnnnnnnnnnnnnnnnnnnnnnnnnnnnnnnnnnnnnnnnnnnnnnnnnnnnnnnnnnnnnnnnnnnnnnnnnnnnnnnnnnnnnnnnnnnnnnnnnnnnnnnnnnnnnnnnnnnnnnnnnnnnnnnnnnnnnnnnnnnnnnnnnnnnnnnnnnnnnnnnnnnnnnnnnnnnnnnnnnnnnnnnnnnnnnnnnnnnnnnnnnnnnnnnnnnnnnnnnnnnnnnnnnnnnnnnnnnnnnnnnnnnnnnnnnnnnnnnnnnnnnnnnnnnnnnnnnnnnnnnnnnnnnnnnnnnnnnnnnnnnnnnnnnnnnnnnnnnnnnnnnnnnnnnnnnnnnnnnnnnnnnnnnnnnnnnnnnnnnnnnnnnnnnnnnnnnnnnnnnnnnnnnnnnnnnnnnnnnnnnnnnnnnnnnnnnnnnnnnnnnnnnnnnnnnnnnnnnnnnnnnnnnnnnnnnnnnnnnnnnnnnnnnnnnnnnnnnnnnnnnnnnnnnnnnnnnnnnnnnnnnnnnnnnnnnnnnnnnnnnnnnnnnnnnnnnnnnnnnnnnnnnnnnnnnnnnnnnnnnnnnnnnnnnnnnnnnnnnnnnnnnnnnnnnnnnnnnnnnnnnnnnnnnnnnnnnnnnnnnnnnnnnnnnnnnnnnnnnnnnnnnnnnnnnnnnnnnnnnnnnnnnnnnnnnnnnnnnnnnnnnnnnnnnnnnnnnnnnnnnnnnnnnnnnnnnnnnnnnnnnnnnnnnnnnnnnnnnnnnnnnnnnnnnnnnnnnnnnnnnnnnnnnnnnnnnnnnnnnnnnnnnnnnnnnnnnnnnnnnnnnnnnnnnnnnnnnnnnnnnnnnnnnnnnnnnnnnnnnnnnnnnnnnnnnnnnnnnnnnnnnnnnnnnnnnnnnnnnnnnnnnnnnnnnnnnnnnnnnnnnnnnnnnnnnnnnnnnnnnnnnnnnnnnnnnnnnnnnnnnnnnnnnnnnnnnnnnnnnnnnnnnnnnnnnnnnnnnnnnnnnnnnnnnnnnnnnnnnnnnnnnnnnnnnnnnnnnnnnnnnnnnnnnnnnnnnnnnnnnnnnnnnnnnnnnnnnnnnnnnnnnnnnnnnnnnnnnnnnnnnnnnnnnnnnnnnnnnnnnnnnnnnnnnnnnnnnnnnnnnnnnnnnnnnnnnnnnnnnnnnnnnnnnnnnnnnnnnnnnnnnnnnnnnnnnnnnnnnnnnnnnnnnnnnnnnnnnnnnnnnnnnnnnnnnnnnnnnnnnnnnnnnnnnnnnnnnnnnnnnnnnnnnnnnnnnnnnnnnnnnnnnnnnnnnnnnnnnnnnnnnnnnnnnnnnnnnnnnnnnnnnnnnnnnnnnnnnnnnnnnnnnnnnnnnnnnnnnnnnnnnnnnnnnnnnnnnnnnnnnnnnnnnnnnnnnnnnnnnnnnnnnnnnnnnnnnnnnnnnnnnnnnnnnnnnnnnnnnnnnnnnnnnnnnnnnnnnnnnnnnnnnnnnnnnnnnnnnnnnnnnnnnnnnnnnnnnnnnnnnnnnnnnnnnnnnnnnnnnnnnnnnnnnnnnnnnnnnnnnnnnnnnnnnnnnnnnnnnnnnnnnnnnnnnnnnnnnnnnnnnnnnnnnnnnnnnnnnnnnnnnnnnnnnnnnnnnnnnnnnnnnnnnnnnnnnnnnnnnnnnnnnnnnnnnnnnnnnnnnnnnnnnnnnnnnnnnnnnnnnnnnnnnnnnnnnnnnnnnnnnnnnnnnnnnnnnnnnnnnnnnnnnnnnnnnnnnnnnnnnnnnnnnnnnnnnnnnnnnnnnnnnnnnnnnnnnnnnnnnnnnnnnnnnnnnnnnnnnnnnnnnnnnnnnnnnnnnnnnnnnnnnnnnnnnnnnnnnnnnnnnnnnnnnnnnnnnnnnnnnnnnnnnnnnnnnnnnnnnnnnnnnnnnnnnnnnnnnnnnnnnnnnnnnnnnnnnnnnnnnnnnnnnnnnnnnnnnnnnnnnnnnnnnnnnnnnnnnnnnnnnnnnnnnnnnnnnnnnnnnnnnnnnnnnnnnnnnnnnnnnnnnnnnnnnnnnnnnnnnnnnnnnnnnnnnnnnnnnnnnnnnnnnnnnnnnnnnnnnnnnnnnnnnnnnnnnnnnnnnnnnnnnnnnnnnnnnnnnnnnnnnnnnnnnnnnnnnnnnnnnnnnnnnnnnnnnnnnnnnnnnnnnnnnnnnnnnnnnnnnnnnnnnnnnnnnnnnnnnnnnnnnnnnnnnnnnnnnnnnnnnnnnnnnnnnnnnnnnnnnnnnnnnnnnnnnnnnnnnnnnnnnnnnnnnnnnnnnnnnnnnnnnnnnnnnnnnnnnnnnnnnnnnnnnnnnnnnnnnnnnnnnnnnnnnnnnnnnnnnnnnnnnnnnnnnnnnnnnnnnnnnnnnnnnnnnnnnnnnnnnnnnnnnnnnnnnnnnnnnnnnnnnnnnnnnnnnnnnnnnnnnnnnnnnnnnnnnnnnnnnnnnnnnnnnnnnnnnnnnnnnnnnnnnnnnnnnnnnnnnnnnnnnnnnnnnnnnnnnnnnnnnnnnnnnnnnnnnnnnnnnnnnnnnnnnnnnnnnnnnnnnnnnnnnnnnnnnnnnnnnnnnnnnnnnnnnnnnnnnnnnnnnnnnnnnnnnnnnnnnnnnnnnnnnnnnnnnnnnnnnnnnnnnnnnnnnnnnnnnnnnnnnnnnnnnnnnnnnnnnnnnnnnnnnnnnnnnnnnnnnnnnnnnnnnnnnnnnnnnnnnnnnnnnnnnnnnnnnnnnnnnnnnnnnnnnnnnnnnnnnnnnnnnnnnnnnnnnnnnnnnnnnnnnnnnnnnnnnnnnnnnnnnnnnnnnnnnnnnnnnnnnnnnnnnnnnnnnnnnnnnnnnnnnnnnnnnnnnnnnnnnnnnnnnnnnnnnnnnnnnnnnnnnnnnnnnnnnnnnnnnnnnnnnnnnnnnnnnnnnnnnnnnnnnnnnnnnnnnnnnnnnnnnnnnnnnnnnnnnnnnnnnnnnnnnnnnnnnnnnnnnnnnnnnnnnnnnnnnnnnnnnnnnnnnnnnnnnnnnnnnnnnnnnnnnnnnnnnnnnnnnnnnnnnnnnnnnnnnnnnnnnnnnnnnnnnnnnnnnnnnnnnnnnnnnnnnnnnnnnnnnnnnnnnnnnnnnnnnnnnnnnnnnnnnnnnnnnnnnnnnnnnnnnnnnnnnnnnnnnnnnnnnnnnnnnnnnnnnnnnnnnnnnnnnnnnnnnnnnnnnnnnnnnnnnnnnnnnnnnnnnnnnnnnnnnnnnnnnnnnnnnnnnnnnnnnnnnnnnnnnnnnnnnnnnnnnnnnnnnnnnnnnnnnnnnnnnnnnnnnnnnnnnnnnnnnnnnnnnnnnnnnnnnnnnnnnnnnnnnnnnnnnnnnnnnnnnnnnnnnnnnnnnnnnnnnnnnnnnnnnnnnnnnnnnnnnnnnnnnnnnnnnnnnnnnnnnnnnnnnnnnnnnnnnnnnnnnnnnnnnnnnnnnnnnnnnnnnnnnnnnnnnnnnnnnnnnnnnnnnnnnnnnnnnnnnnnnnnnnnnnnnnnnnnnnnnnnnnnnnnnnnnnnnnnnnnnnnnnnnnnnnnnnnnnnnnnnnnnnnnnnnnnnnnnnnnnnnnnnnnnnnnnnnnnnnnnnnnnnnnnnnnnnnnnnnnnnnnnnnnnnnnnnnnnnnnnnnnnnnnnnnnnnnnnnnnnnnnnnnnnnnnnnnnnnnnnnnnnnnnnnnnnnnnnnnnnnnnnnnnnnnnnnnnnnnnnnnnnnnnnnnnnnnnnnnnnnnnnnnnnnnnnnnnnnnnnnnnnnnnnnnnnnnnnnnnnnnnnnnnnnnnnnnnnnnnnnnnnnnnnnnnnnnnnnnnnnnnnnnnnnnnnnnnnnnnnnnnnnnnnnnnnnnnnnnnnnnnnnnnnnnnnnnnnnnnnnnnnnnnnnnnnnnnnnnnnnnnnnnnnnnnnnnnnnnnnnnnnnnnnnnnnnnnnnnnnnnnnnnnnnnnnnnnnnnnnnnnnnnnnnnnnnnnnnnnnnnnnnnnnnnnnnnnnnnnnnnnnnnnnnnnnnnnnnnnnnnnnnnnnnnnnnnnnnnnnnnnnnnnnnnnnnnnnnnnnnnnnnnnnnnnnnnnnnnnnnnnnnnnnnnnnnnnnnnnnnnnnnnnnnnnnnnnnnnnnnnnnnnnnnnnnnnnnnnnnnnnnnnnnnnnnnnnnnnnnnnnnnnnnnnnnnnnnnnnnnnnnnnnnnnnnnnnnnnnnnnnnnnnnnnnnnnnnnnnnnnnnnnnnnnnnnnnnnnnnnnnnnnnnnnnnnnnnnnnnnnnnnnnnnnnnnnnnnnnnnnnnnnnnnnnnnnnnnnnnnnnnnnnnnnnnnnnnnnnnnnnnnnnnnnnnnnnnnnnnnnnnnnnnnnnnnnnnnnnnnnnnnnnnnnnnnnnnnnnnnnnnnnnnnnnnnnnnnnnnnnnnnnnnnnnnnnnnnnnnnnnnnnnnnnnnnnnnnnnnnnnnnnnnnnnnnnnnnnnnnnnnnnnnnnnnnnnnnnnnnnnnnnnnnnnnnnnnnnnnnnnnnnnnnnnnnnnnnnnnnnnnnnnnnnnnnnnnnnnnnnnnnnnnnnnnnnnnnnnnnnnnnnnnnnnnnnnnnnnnnnnnnnnnnnnnnnnnnnnnnnnnnnnnnnnnnnnnnnnnnnnnnnnnnnnnnnnnnnnnnnnnnnnnnnnnnnnnnnnnnnnnnnnnnnnnnnnnnnnnnnnnnnnnnnnnnnnnnnnnnnnnnnnnnnnnnnnnnnnnnnnnnnnnnnnnnnnnnnnnnnnnnnnnnnnnnnnnnnnnnnnnnnnnnnnnnnnnnnnnnnnnnnnnnnnnnnnnnnnnnnnnnnnnnnnnnnnnnnnnnnnnnnnnnnnnnnnnnnnnnnnnnnnnnnnnnnnnnnnnnnnnnnnnnnnnnnnnnnnnnnnnnnnnnnnnnnnnnnnnnnnnnnnnnnnnnnnnnnnnnnnnnnnnnnnnnnnnnnnnnnnnnnnnnnnnnnnnnnnnnnnnnnnnnnnnnnnnnnnnnnnnnnnnnnnnnnnnnnnnnnnnnnnnnnnnnnnnnnnnnnnnnnnnnnnnnnnnnnnnnnnnnnnnnnnnnnnnnnnnnnnnnnnnnnnnnnnnnnnnnnnnnnnnnnnnnnnnnnnnnnnnnnnnnnnnnnnnnnnnnnnnnnnnnnnnnnnnnnnnnnnnnnnnnnnnnnnnnnnnnnnnnnnnnnnnnnnnnnnnnnnnnnnnnnnnnnnnnnnnnnnnnnnnnnnnnnnnnnnnnnnnnnnnnnnnnnnnnnnnnnnnnnnnnnnnnnnnnnnnnnnnnnnnnnnnnnnnnnnnnnnnnnnnnnnnnnnnnnnnnnnnnnnnnnnnnnnnnnnnnnnnnnnnnnnnnnnnnnnnnnnnnnnnnnnnnnnnnnnnnnnnnnnnnnnnnnnnnnnnnnnnnnnnnnnnnnnnnnnnnnnnnnnnnnnnnnnnnnnnnnnnnnnnnnnnnnnnnnnnnnnnnnnnnnnnnnnnnnnnnnnnnnnnnnnnnnnnnnnnnnnnnnnnnnnnnnnnnnnnnnnnnnnnnnnnnnnnnnnnnnnnnnnnnnnnnnnnnnnnnnnnnnnnnnnnnnnnnnnnnnnnnnnnnnnnnnnnnnnnnnnnnnnnnnnnnnnnnnnnnnnnnnnnnnnnnnnnnnnnnnnnnnnnnnnnnnnnnnnnnnnnnnnnnnnnnnnnnnnnnnnnnnnnnnnnnnnnnnnnnnnnnnnnnnnnnnnnnnnnnnnnnnnnnnnnnnnnnnnnnnnnnnnnnnnnnnnnnnnnnnnnnnnnnnnnnnnnnnnnnnnnnnnnnnnnnnnnnnnnnnnnnnnnnnnnnnnnnnnnnnnnnnnnnnnnnnnnnnnnnnnnnnnnnnnnnnnnnnnnnnnnnnnnnnnnnnnnnnnnnnnnnnnnnnnnnnnnnnnnnnnnnnnnnnnnnnnnnnnnnnnnnnnnnnnnnnnnnnnnnnnnnnnnnnnnnnnnnnnnnnnnnnnnnnnnnnnnnnnnnnnnnnnnnnnnnnnnnnnnnnnnnnnnnnnnnnnnnnnnnnnnnnnnnnnnnnnnnnnnnnnnnnnnnnnnnnnnnnnnnnnnnnnnnnnnnnnnnnnnnnnnnnnnnnnnnnnnnnnnnnnnnnnnnnnnnnnnnnnnnnnnnnnnnnnnnnnnnnnnnnnnnnnnnnnnnnnnnnnnnnnnnnnnnnnnnnnnnnnnnnnnnnnnnnnnnnnnnnnnnnnnnnnnnnnnnnnnnnnnnnnnnnnnnnnnnnnnnnnnnnnnnnnnnnnnnnnnnnnnnnnnnnnnnnnnnnnnnnnnnnnnnnnnnnnnnnnnnnnnnnnnnnnnnnnnnnnnnnnnnnnnnnnnnnnnnnnnnnnnnnnnnnnnnnnnnnnnnnnnnnnnnnnnnnnnnnnnnnnnnnnnnnnnnnnnnnnnnnnnnnnnnnnnnnnnnnnnnnnnnnnnnnnnnnnnnnnnnnnnnnnnnnnnnnnnnnnnnnnnnnnnnnnnnnnnnnnnnnnnnnnnnnnnnnnnnnnnnnnnnnnnnnnnnnnnnnnnnnnnnnnnnnnnnnnnnnnnnnnnnnnnnnnnnnnnnnnnnnnnnnnnnnnnnnnnnnnnnnnnnnnnnnnnnnnnnnnnnnnnnnnnnnnnnnnnnnnnnnnnnnnnnnnnnnnnnnnnnnnnnnnnnnnnnnnnnnnnnnnnnnnnnnnnnnnnnnnnnnnnnnnnnnnnnnnnnnnnnnnnnnnnnnnnnnnnnnnnnnnnnnnnnnnnnnnnnnnnnnnnnnnnnnnnnnnnnnnnnnnnnnnnnnnnnnnnnnnnnnnnnnnnnnnnnnnnnnnnnnnnnnnnnnnnnnnnnnnnnnnnnnnnnnnnnnnnnnnnnnnnnnnnnnnnnnnnnnnnnnnnnnnnnnnnnnnnnnnnnnnnnnnnnnnnnnnnnnnnnnnnnnnnnnnnnnnnnnnnnnnnnnnnnnnnnnnnnnnnnnnnnnnnnnnnnnnnnnnnnnnnnnnnnnnnnnnnnnnnnnnnnnnnnnnnnnnnnnnnnnnnnnnnnnnnnnnnnnnnnnnnnnnnnnnnnnnnnnnnnnnnnnnnnnnnnnnnnnnnnnnnnnnnnnnnnnnnnnnnnnnnnnnnnnnnnnnnnnnnnnnnnnnnnnnnnnnnnnnnnnnnnnnnnnnnnnnnnnnnnnnnnnnnnnnnnnnnnnnnnnnnnnnnnnnnnnnnnnnnnnnnnnnnnnnnnnnnnnnnnnnnnnnnnnnnnnnnnnnnnnnnnnnnnnnnnnnnnnnnnnnnnnnnnnnnnnnnnnnnnnnnnnnnnnnnnnnnnnnnnnnnnnnnnnnnnnnnnnnnnnnnnnnnnnnnnnnnnnnnnnnnnnnnnnnnnnnnnnnnnnnnnnnnnnnnnnnnnnnnnnnnnnnnnnnnnnnnnnnnnnnnnnnnnnnnnnnnnnnnnnnnnnnnnnnnnnnnnnnnnnnnnnnnnnnnnnnnnnnnnnnnnnnnnnnnnnnnnnnnnnnnnnnnnnnnnnnnnnnnnnnnnnnnnnnnnnnnnnnnnnnnnnnnnnnnnnnnnnnnnnnnnnnnnnnnnnnnnnnnnnnnnnnnnnnnnnnnnnnnnnnnnnnnnnnnnnnnnnnnnnnnnnnnnnnnnnnnnnnnnnnnnnnnnnnnnnnnnnnnnnnnnnnnnnnnnnnnnnnnnnnnnnnnnnnnnnnnnnnnnnnnnnnnnnnnnnnnnnnnnnnnnnnnnnnnnnnnnnnnnnnnnnnnnnnnnnnnnnnnnnnnnnnnnnnnnnnnnnnnnnnnnnnnnnnnnnnnnnnnnnnnnnnnnnnnnnnnnnnnnnnnnnnnnnnnnnnnnnnnnnnnnnnnnnnnnnnnnnnnnnnnnnnnnnnnnnnnnnnnnnnnnnnnnnnnnnnnnnnnnnnnnnnnnnnnnnnnnnnnnnnnnnnnnnnnnnnnnnnnnnnnnnnnnnnnnnnnnnnnnnnnnnnnnnnnnnnnnnnnnnnnnnnnnnnnnnnnnnnnnnnnnnnnnnnnnnnnnnnnnnnnnnnnnnnnnnnnnnnnnnnnnnnnnnnnnnnnnnnnnnnnnnnnnnnnnnnnnnnnnnnnnnnnnnnnnnnnnnnnnnnnnnnnnnnnnnnnnnnnnnnnnnnnnnnnnnnnnnnnnnnnnnnnnnnnnnnnnnnnnnnnnnnnnnnnnnnnnnnnnnnnnnnnnnnnnnnnnnnnnnnnnnnnnnnnnnnnnnnnnnnnnnnnnnnnnnnnnnnnnnnnnnnnnnnnnnnnnnnnnnnnnnnnnnnnnnnnnnnnnnnnnnnnnnnnnnnnnnnnnnnnnnnnnnnnnnnnnnnnnnnnnnnnnnnnnnnnnnnnnnnnnnnnnnnnnnnnnnnnnnnnnnnnnnnnnnnnnnnnnnnnnnnnnnnnnnnnnnnnnnnnnnnnnnnnnnnnnnnnnnnnnnnnnnnnnnnnnnnnnnnnnnnnnnnnnnnnnnnnnnnnnnnnnnnnnnnnnnnnnnnnnnnnnnnnnnnnnnnnnnnnnnnnnnnnnnnnnnnnnnnnnnnnnnnnnnnnnnnnnnnnnnnnnnnnnnnnnnnnnnnnnnnnnnnnnnnnnnnnnnnnnnnnnnnnnnnnnnnnnnnnnnnnnnnnnnnnnnnnnnnnnnnnnnnnnnnnnnnnnnnnnnnnnnnnnnnnnnnnnnnnnnnnnnnnnnnnnnnnnnnnnnnnnnnnnnnnnnnnnnnnnnnnnnnnnnnnnnnnnnnnnnnnnnnnnnnnnnnnnnnnnnnnnnnnnnnnnnnnnnnnnnnnnnnnnnnnnnnnnnnnnnnnnnnnnnnnnnnnnnnnnnnnnnnnnnnnnnnnnnnnnnnnnnnnnnnnnnnnnnnnnnnnnnnnnnnnnnnnnnnnnnnnnnnnnnnnnnnnnnnnnnnnnnnnnnnnnnnnnnnnnnnnnnnnnnnnnnnnnnnnnnnnnnnnnnnnnnnnnnnnnnnnnnnnnnnnnnnnnnnnnnnnnnnnnnnnnnnnnnnnnnnnnnnnnnnnnnnnnnnnnnnnnnnnnnnnnnnnnnnnnnnnnnnnnnnnnnnnnnnnnnnnnnnnnnnnnnnnnnnnnnnnnnnnnnnnnnnnnnnnnnnnnnnnnnnnnnnnnnnnnnnnnnnnnnnnnnnnnnnnnnnnnnnnnnnnnnnnnnnnnnnnnnnnnnnnnnnnnnnnnnnnnnnnnnnnnnnnnnnnnnnnnnnnnnnnnnnnnnnnnnnnnnnnnnnnnnnnnnnnnnnnnnnnnnnnnnnnnnnnnnnnnnnnnnnnnnnnnnnnnnnnnnnnnnnnnnnnnnnnnnnnnnnnnnnnnnnnnnnnnnnnnnnnnnnnnnnnnnnnnnnnnnnnnnnnnnnnnnnnnnnnnnnnnnnnnnnnnnnnnnnnnnnnnnnnnnnnnnnnnnnnnnnnnnnnnnnnnnnnnnnnnnnnnnnnnnnnnnnnnnnnnnnnnnnnnnnnnnnnnnnnnnnnnnnnnnnnnnnnnnnnnnnnnnnnnnnnnnnnnnnnnnnnnnnnnnnnnnnnnnnnnnnnnnnnnnnnnnnnnnnnnnnnnnnnnnnnnnnnnnnnnnnnnnnnnnnnnnnnnnnnnnnnnnnnnnnnnnnnnnnnnnnnnnnnnnnnnnnnnnnnnnnnnnnnnnnnnnnnnnnnnnnnnnnnnnnnnnnnnnnnnnnnnnnnnnnnnnnnnnnnnnnnnnnnnnnnnnnnnnnnnnnnnnnnnnnnnnnnnnnnnnnnnnnnnnnnnnnnnnnnnnnnnnnnnnnnnnnnnnnnnnnnnnnnnnnnnnnnnnnnnnnnnnnnnnnnnnnnnnnnnnnnnnnnnnnnnnnnnnnnnnnnnnnnnnnnnnnnnnnnnnnnnnnnnnnnnnnnnnnnnnnnnnnnnnnnnnnnnnnnnnnnnnnnnnnnnnnnnnnnnnnnnnnnnnnnnnnnnnnnnnnnnnnnnnnnnnnnnnnnnnnnnnnnnnnnnnnnnnnnnnnnnnnnnnnnnnnnnnnnnnnnnnnnnnnnnnnnnnnnnnnnnnnnnnnnnnnnnnnnnnnnnnnnnnnnnnnnnnnnnnnnnnnnnnnnnnnnnnnnnnnnnnnnnnnnnnnnnnnnnnnnnnnnnnnnnnnnnnnnnnnnnnnnnnnnnnnnnnnnnnnnnnnnnnnnnnnnnnnnnnnnnnnnnnnnnnnnnnnnnnnnnnnnnnnnnnnnnnnnnnnnnnnnnnnnnnnnnnnnnnnnnnnnnnnnnnnnnnnnnnnnnnnnnnnnnnnnnnnnnnnnnnnnnnnnnnnnnnnnnnnnnnnnnnnnnnnnnnnnnnnnnnnnnnnnnnnnnnnnnnnnnnnnnnnnnnnnnnnnnnnnnnnnnnnnnnnnnnnnnnnnnnnnnnnnnnnnnnnnnnnnnnnnnnnnnnnnnnnnnnnnnnnnnnnnnnnnnnnnnnnnnnnnnnnnnnnnnnnnnnnnnnnnnnnnnnnnnnnnnnnnnnnnnnnnnnnnnnnnnnnnnnnnnnnnnnnnnnnnnnnnnnnnnnnnnnnnnnnnnnnnnnnnnnnnnnnnnnnnnnnnnnnnnnnnnnnnnnnnnnnnnnnnnnnnnnnnnnnnnnnnnnnnnnnnnnnnnnnnnnnnnnnnnnnnnnnnnnnnnnnnnnnnnnnnnnnnnnnnnnnnnnnnnnnnnnnnnnnnnnnnnnnnnnnnnnnnnnnnnnnnnnnnnnnnnnnnnnnnnnnnnnnnnnnnnnnnnnnnnnnnnnnnnnnnnnnnnnnnnnnnnnnnnnnnnnnnnnnnnnnnnnnnnnnnnnnnnnnnnnnnnnnnnnnnnnnnnnnnnnnnnnnnnnnnnnnnnnnnnnnnnnnnnnnnnnnnnnnnnnnnnnnnnnnnnnnnnnnnnnnnnnnnnnnnnnnnnnnnnnnnnnnnnnnnnnnnnnnnnnnnnnnnnnnnnnnnnnnnnnnnnnnnnnnnnnnnnnnnnnnnnnnnnnnnnnnnnnnnnnnnnnnnnnnnnnnnnnnnnnnnnnnnnnnnnnnnnnnnnnnnnnnnnnnnnnnnnnnnnnnnnnnnnnnnnnnnnnnnnnnnnnnnnnnnnnnnnnnnnnnnnnnnnnnnnnnnnnnnnnnnnnnnnnnnnnnnnnnnnnnnnnnnnnnnnnnnnnnnnnnnnnnnnnnnnnnnnnnnnnnnnnnnnnnnnnnnnnnnnnnnnnnnnnnnnnnnnnnnnnnnnnnnnnnnnnnnnnnnnnnnnnnnnnnnnnnnnnnnnnnnnnnnnnnnnnnnnnnnnnnnnnnnnnnnnnnnnnnnnnnnnnnnnnnnnnnnnnnnnnnnnnnnnnnnnnnnnnnnnnnnnnnnnnnnnnnnnnnnnnnnnnnnnnnnnnnnnnnnnnnnnnnnnnnnnnnnnnnnnnnnnnnnnnnnnnnnnnnnnnnnnnnnnnnnnnnnnnnnnnnnnnnnnnnnnnnnnnnnnnnnnnnnnnnnnnnnnnnnnnnnnnnnnnnnnnnnnnnnnnnnnnnnnnnnnnnnnnnnnnnnnnnnnnnnnnnnnnnnnnnnnnnnnnnnnnnnnnnnnnnnnnnnnnnnnnnnnnnnnnnnnnnnnnnnnnnnnnnnnnnnnnnnnnnnnnnnnnnnnnnnnnnnnnnnnnnnnnnnnnnnnnnnnnnnnnnnnnnnnnnnnnnnnnnnnnnnnnnnnnnnnnnnnnnnnnnnnnnnnnnnnnnnnnnnnnnnnnnnnnnnnnnnnnnnnnnnnnnnnnnnnnnnnnnnnnnnnnnnnnnnnnnnnnnnnnnnnnnnnnnnnnnnnnnnnnnnnnnnnnnnnnnnnnnnnnnnnnnnnnnnnnnnnnnnnnnnnnnnnnnnnnnnnnnnnnnnnnnnnnnnnnnnnnnnnnnnnnnnnnnnnnnnnnnnnnnnnnnnnnnnnnnnnnnnnnnnnnnnnnnnnnnnnnnnnnnnnnnnnnnnnnnnnnnnnnnnnnnnnnnnnnnnnnnnnnnnnnnnnnnnnnnnnnnnnnnnnnnnnnnnnnnnnnnnnnnnnnnnnnnnnnnnnnnnnnnnnnnnnnnnnnnnnnnnnnnnnnnnnnnnnnnnnnnnnnnnnnnnnnnnnnnnnnnnnnnnnnnnnnnnnnnnnnnnnnnnnnnnnnnnnnnnnnnnnnnnnnnnnnnnnnnnnnnnnnnnnnnnnnnnnnnnnnnnnnnnnnnnnnnnnnnnnnnnnnnnnnnnnnnnnnnnnnnnnnnnnnnnnnnnnnnnnnnnnnnnnnnnnnnnnnnnnnnnnnnnnnnnnnnnnnnnnnnnnnnnnnnnnnnnnnnnnnnnnnnnnnnnnnnnnnnnnnnnnnnnnnnnnnnnnnnnnnnnnnnnnnnnnnnnnnnnnnnnnnnnnnnnnnnnnnnnnnnnnnnnnnnnnnnnnnnnnnnnnnnnnnnnnnnnnnnnnnnnnnnnnnnnnnnnnnnnnnnnnnnnnnnnnnnnnnnnnnnnnnnnnnnnnnnnnnnnnnnnnnnnnnnnnnnnnnnnnnnnnnnnnnnnnnnnnnnnnnnnnnnnnnnnnnnnnnnnnnnnnnnnnnnnnnnnnnnnnnnnnnnnnnnnnnnnnnnnnnnnnnnnnnnnnnnnnnnnnnnnnnnnnnnnnnnnnnnnnnnnnnnnnnnnnnnnnnnnnnnnnnnnnnnnnnnnnnnnnnnnnnnnnnnnnnnnnnnnnnnnnnnnnnnnnnnnnnnnnnnnnnnnnnnnnnnnnnnnnnnnnnnnnnnnnnnnnnnnnnnnnnnnnnnnnnnnnnnnnnnnnnnnnnnnnnnnnnnnnnnnnnnnnnnnnnnnnnnnnnnnnnnnnnnnnnnnnnnnnnnnnnnnnnnnnnnnnnnnnnnnnnnnnnnnnnnnnnnnnnnnnnnnnnnnnnnnnnnnnnnnnnnnnnnnnnnnnnnnnnnnnnnnnnnnnnnnnnnnnnnnnnnnnnnnnnnnnnnnnnnnnnnnnnnnnnnnnnnnnnnnnnnnnnnnnnnnnnnnnnnnnnnnnnnnnnnnnnnnnnnnnnnnnnnnnnnnnnnnnnnnnnnnnnnnnnnnnnnnnnnnnnnnnnnnnnnnnnnnnnnnnnnnnnnnnnnnnnnnnnnnnnnnnnnnnnnnnnnnnnnnnnnnnnnnnnnnnnnnnnnnnnnnnnnnnnnnnnnnnnnnnnnnnnnnnnnnnnnnnnnnnnnnnnnnnnnnnnnnnnnnnnnnnnnnnnnnnnnnnnnnnnnnnnnnnnnnnnnnnnnnnnnnnnnnnnnnnnnnnnnnnnnnnnnnnnnnnnnnnnnnnnnnnnnnnnnnnnnnnnnnnnnnnnnnnnnnnnnnnnnnnnnnnnnnnnnnnnnnnnnnnnnnnnnnnnnnnnnnnnnnnnnnnnnnnnnnnnnnnnnnnnnnnnnnnnnnnnnnnnnnnnnnnnnnnnnnnnnnnnnnnnnnnnnnnnnnnnnnnnnnnnnnnnnnnnnnnnnnnnnnnnnnnnnnnnnnnnnnnnnnnnnnnnnnnnnnnnnnnnnnnnnnnnnnnnnnnnnnnnnnnnnnnnnnnnnnnnnnnnnnnnnnnnnnnnnnnnnnnnnnnnnnnnnnnnnnnnnnnnnnnnnnnnnnnnnnnnnnnnnnnnnnnnnnnnnnnnnnnnnnnnnnnnnnnnnnnnnnnnnnnnnnnnnnnnnnnnnnnnnnnnnnnnnnnnnnnnnnnnnnnnnnnnnnnnnnnnnnnnnnnnnnnnnnnnnnnnnnnnnnnnnnnnnnnnnnnnnnnnnnnnnnnnnnnnnnnnnnnnnnnnnnnnnnnnnnnnnnnnnnnnnnnnnnnnnnnnnnnnnnnnnnnnnnnnnnnnnnnnnnnnnnnnnnnnnnnnnnnnnnnnnnnnnnnnnnnnnnnnnnnnnnnnnnnnnnnnnnnnnnnnnnnnnnnnnnnnnnnnnnnnnnnnnnnnnnnnnnnnnnnnnnnnnnnnnnnnnnnnnnnnnnnnnnnnnnnnnnnnnnnnnnnnnnnnnnnnnnnnnnnnnnnnnnnnnnnnnnnnnnnnnnnnnnnnnnnnnnnnnnnnnnnnnnnnnnnnnnnnnnnnnnnnnnnnnnnnnnnnnnnnnnnnnnnnnnnnnnnnnnnnnnnnnnnnnnnnnnnnnnnnnnnnnnnnnnnnnnnnnnnnnnnnnnnnnnnnnnnnnnnnnnnnnnnnnnnnnnnnnnnnnnnnnnnnnnnnnnnnnnnnnnnnnnnnnnnnnnnnnnnnnnnnnnnnnnnnnnnnnnnnnnnnnnnnnnnnnnnnnnnnnnnnnnnnnnnnnnnnnnnnnnnnnnnnnnnnnnnnnnnnnnnnnnnnnnnnnnnnnnnnnnnnnnnnnnnnnnnnnnnnnnnnnnnnnnnnnnnnnnnnnnnnnnnnnnnnnnnnnnnnnnnnnnnnnnnnnnnnnnnnnnnnnnnnnnnnnnnnnnnnnnnnnnnnnnnnnnnnnnnnnnnnnnnnnnnnnnnnnnnnnnnnnnnnnnnnnnnnnnnnnnnnnnnnnnnnnnnnnnnnnnnnnnnnnnnnnnnnnnnnnnnnnnnnnnnnnnnnnnnnnnnnnnnnnnnnnnnnnnnnnnnnnnnnnnnnnnnnnnnnnnnnnnnnnnnnnnnnnnnnnnnnnnnnnnnnnnnnnnnnnnnnnnnnnnnnnnnnnnnnnnnnnnnnnnnnnnnnnnnnnnnnnnnnnnnnnnnnnnnnnnnnnnnnnnnnnnnnnnnnnnnnnnnnnnnnnnnnnnnnnnnnnnnnnnnnnnnnnnnnnnnnnnnnnnnnnnnnnnnnnnnnnnnnnnnnnnnnnnnnnnnnnnnnnnnnnnnnnnnnnnnnnnnnnnnnnnnnnnnnnnnnnnnnnnnnnnnnnnnnnnnnnnnnnnnnnnnnnnnnnnnnnnnnnnnnnnnnnnnnnnnnnnnnnnnnnnnnnnnnnnnnnnnnnnnnnnnnnnnnnnnnnnnnnnnnnnnnnnnnnnnnnnnnnnnnnnnnnnnnnnnnnnnnnnnnnnnnnnnnnnnnnnnnnnnnnnnnnnnnnnnnnnnnnnnnnnnnnnnnnnnnnnnnnnnnnnnnnnnnnnnnnnnnnnnnnnnnnnnnnnnnnnnnnnnnnnnnnnnnnnnnnnnnnnnnnnnnnnnnnnnnnnnnnnnnnnnnnnnnnnnnnnnnnnnnnnnnnnnnnnnnnnnnnnnnnnnnnnnnnnnnnnnnnnnnnnnnnnnnnnnnnnnnnnnnnnnnnnnnnnnnnnnnnnnnnnnnnnnnnnnnnnnnnnnnnnnnnnnnnnnnnnnnnnnnnnnnnnnnnnnnnnnnnnnnnnnnnnnnnnnnnnnnnnnnnnnnnnnnnnnnnnnnnnnnnnnnnnnnnnnnnnnnnnnnnnnnnnnnnnnnnnnnnnnnnnnnnnnnnnnnnnnnnnnnnnnnnnnnnnnnnnnnnnnnnnnnnnnnnnnnnnnnnnnnnnnnnnnnnnnnnnnnnnnnnnnnnnnnnnnnnnnnnnnnnnnnnnnnnnnnnnnnnnnnnnnnnnnnnnnnnnnnnnnnnnnnnnnnnnnnnnnnnnnnnnnnnnnnnnnnnnnnnnnnnnnnnnnnnnnnnnnnnnnnnnnnnnnnnnnnnnnnnnnnnnnnnnnnnnnnnnnnnnnnnnnnnnnnnnnnnnnnnnnnnnnnnnnnnnnnnnnnnnnnnnnnnnnnnnnnnnnnnnnnnnnnnnnnnnnnnnnnnnnnnnnnnnnnnnnnnnnnnnnnnnnnnnnnnnnnnnnnnnnnnnnnnnnnnnnnnnnnnnnnnnnnnnnnnnnnnnnnnnnnnnnnnnnnnnnnnnnnnnnnnnnnnnnnnnnnnnnnnnnnnnnnnnnnnnnnnnnnnnnnnnnnnnnnnnnnnnnnnnnnnnnnnnnnnnnnnnnnnnnnnnnnnnnnnnnnnnnnnnnnnnnnnnnnnnnnnnnnnnnnnnnnnnnnnnnnnnnnnnnnnnnnnnnnnnnnnnnnnnnnnnnnnnnnnnnnnnnnnnnnnnnnnnnnnnnnnnnnnnnnnnnnnnnnnnnnnnnnnnnnnnnnnnnnnnnnnnnnnnnnnnnnnnnnnnnnnnnnnnnnnnnnnnnnnnnnnnnnnnnnnnnnnnnnnnnnnnnnnnnnnnnnnnnnnnnnnnnnnnnnnnnnnnnnnnnnnnnnnnnnnnnnnnnnnnnnnnnnnnnnnnnnnnnnnnnnnnnnnnnnnnnnnnnnnnnnnnnnnnnnnnnnnnnnnnnnnnnnnnnnnnnnnnnnnnnnnnnnnnnnnnnnnnnnnnnnnnnnnnnnnnnnnnnnnnnnnnnnnnnnnnnnnnnnnnnnnnnnnnnnnnnnnnnnnnnnnnnnnnnnnnnnnnnnnnnnnnnnnnnnnnnnnnnnnnnnnnnnnnnnnnnnnnnnnnnnnnnnnnnnnnnnnnnnnnnnnnnnnnnnnnnnnnnnnnnnnnnnnnnnnnnnnnnnnnnnnnnnnnnnnnnnnnnnnnnnnnnnnnnnnnnnnnnnnnnnnnnnnnnnnnnnnnnnnnnnnnnnnnnnnnnnnnnnnnnnnnnnnnnnnnnnnnnnnnnnnnnnnnnnnnnnnnnnnnnnnnnnnnnnnnnnnnnnnnnnnnnnnnnnnnnnnnnnnnnnnnnnnnnnnnnnnnnnnnnnnnnnnnnnnnnnnnnnnnnnnnnnnnnnnnnnnnnnnnnnnnnnnnnnnnnnnnnnnnnnnnnnnnnnnnnnnnnnnnnnnnnnnnnnnnnnnnnnnnnnnnnnnnnnnnnnnnnnnnnnnnnnnnnnnnnnnnnnnnnnnnnnnnnnnnnnnnnnnnnnnnnnnnnnnnnnnnnnnnnnnnnnnnnnnnnnnnnnnnnnnnnnnnnnnnnnnnnnnnnnnnnnnnnnnnnnnnnnnnnnnnnnnnnnnnnnnnnnnnnnnnnnnnnnnnnnnnnnnnnnnnnnnnnnnnnnnnnnnnnnnnnnnnnnnnnnnnnnnnnnnnnnnnnnnnnnnnnnnnnnnnnnnnnnnnnnnnnnnnnnnnnnnnnnnnnnnnnnnnnnnnnnnnnnnnnnnnnnnnnnnnnnnnnnnnnnnnnnnnnnnnnnnnnnnnnnnnnnnnnnnnnnnnnnnnnnnnnnnnnnnnnnnnnnnnnnnnnnnnnnnnnnnnnnnnnnnnnnnnnnnnnnnnnnnnnnnnnnnnnnnnnnnnnnnnnnnnnnnnnnnnnnnnnnnnnnnnnnnnnnnnnnnnnnnnnnnnnnnnnnnnnnnnnnnnnnnnnnnnnnnnnnnnnnnnnnnnnnnnnnnnnnnnnnnnnnnnnnnnnnnnnnnnnnnnnnnnnnnnnnnnnnnnnnnnnnnnnnnnnnnnnnnnnnnnnnnnnnnnnnnnnnnnnnnnnnnnnnnnnnnnnnnnnnnnnnnnnnnnnnnnnnnnnnnnnnnnnnnnnnnnnnnnnnnnnnnnnnnnnnnnnnnnnnnnnnnnnnnnnnnnnnnnnnnnnnnnnnnnnnnnnnnnnnnnnnnnnnnnnnnnnnnnnnnnnnnnnnnnnnnnnnnnnnnnnnnnnnnnnnnnnnnnnnnnnnnnnnnnnnnnnnnnnnnnnnnnnnnnnnnnnnnnnnnnnnnnnnnnnnnnnnnnnnnnnnnnnnnnnnnnnnnnnnnnnnnnnnnnnnnnnnnnnnnnnnnnnnnnnnnnnnnnnnnnnnnnnnnnnnnnnnnnnnnnnnnnnnnnnnnnnnnnnnnnnnnnnnnnnnnnnnnnnnnnnnnnnnnnnnnnnnnnnnnnnnnnnnnnnnnnnnnnnnnnnnnnnnnnnnnnnnnnnnnnnnnnnnnnnnnnnnnnnnnnnnnnnnnnnnnnnnnnnnnnnnnnnnnnnnnnnnnnnnnnnnnnnnnnnnnnnnnnnnnnnnnnnnnnnnnnnnnnnnnnnnnnnnnnnnnnnnnnnnnnnnnnnnnnnnnnnnnnnnnnnnnnnnnnnnnnnnnnnnnnnnnnnnnnnnnnnnnnnnnnnnnnnnnnnnnnnnnnnnnnnnnnnnnnnnnnnnnnnnnnnnnnnnnnnnnnnnnnnnnnnnnnnnnnnnnnnnnnnnnnnnnnnnnnnnnnnnnnnnnnnnnnnnnnnnnnnnnnnnnnnnnnnnnnnnnnnnnnnnnnnnnnnnnnnnnnnnnnnnnnnnnnnnnnnnnnnnnnnnnnnnnnnnnnnnnnnnnnnnnnnnnnnnnnnnnnnnnnnnnnnnnnnnnnnnnnnnnnnnnnnnnnnnnnnnnnnnnnnnnnnnnnnnnnnnnnnnnnnnnnnnnnnnnnnnnnnnnnnnnnnnnnnnnnnnnnnnnnnnnnnnnnnnnnnnnnnnnnnnnnnnnnnnnnnnnnnnnnnnnnnnnnnnnnnnnnnnnnnnnnnnnnnnnnnnnnnnnnnnnnnnnnnnnnnnnnnnnnnnnnnnnnnnnnnnnnnnnnnnnnnnnnnnnnnnnnnnnnnnnnnnnnnnnnnnnnnnnnnnnnnnnnnnnnnnnnnnnnnnnnnnnnnnnnnnnnnnnnnnnnnnnnnnnnnnnnnnnnnnnnnnnnnnnnnnnnnnnnnnnnnnnnnnnnnnnnnnnnnnnnnnnnnnnnnnnnnnnnnnnnnnnnnnnnnnnnnnnnnnnnnnnnnnnnnnnnnnnnnnnnnnnnnnnnnnnnnnnnnnnnnnnnnnnnnnnnnnnnnnnnnnnnnnnnnnnnnnnnnnnnnnnnnnnnnnnnnnnnnnnnnnnnnnnnnnnnnnnnnnnnnnnnnnnnnnnnnnnnnnnnnnnnnnnnnnnnnnnnnnnnnnnnnnnnnnnnnnnnnnnnnnnnnnnnnnnnnnnnnnnnnnnnnnnnnnnnnnnnnnnnnnnnnnnnnnnnnnnnnnnnnnnnnnnnnnnnnnnnnnnnnnnnnnnnnnnnnnnnnnnnnnnnnnnnnnnnnnnnnnnnnnnnnnnnnnnnnnnnnnnnnnnnnnnnnnnnnnnnnnnnnnnnnnnnnnnnnnnnnnnnnnnnnnnnnnnnnnnnnnnnnnnnnnnnnnnnnnnnnnnnnnnnnnnnnnnnnnnnnnnnnnnnnnnnnnnnnnnnnnnnnnnnnnnnnnnnnnnnnnnnnnnnnnnnnnnnnnnnnnnnnnnnnnnnnnnnnnnnnnnnnnnnnnnnnnnnnnnnnnnnnnnnnnnnnnnnnnnnnnnnnnnnnnnnnnnnnnnnnnnnnnnnnnnnnnnnnnnnnnnnnnnnnnnnnnnnnnnnnnnnnnnnnnnnnnnnnnnnnnnnnnnnnnnnnnnnnnnnnnnnnnnnnnnnnnnnnnnnnnnnnnnnnnnnnnnnnnnnnnnnnnnnnnnnnnnnnnnnnnnnnnnnnnnnnnnnnnnnnnnnnnnnnnnnnnnnnnnnnnnnnnnnnnnnnnnnnnnnnnnnnnnnnnnnnnnnnnnnnnnnnnnnnnnnnnnnnnnnnnnnnnnnnnnnnnnnnnnnnnnnnnnnnnnnnnnnnnnnnnnnnnnnnnnnnnnnnnnnnnnnnnnnnnnnnnnnnnnnnnnnnnnnnnnnnnnnnnnnnnnnnnnnnnnnnnnnnnnnnnnnnnnnnnnnnnnnnnnnnnnnnnnnnnnnnnnnnnnnnnnnnnnnnnnnnnnnnnnnnnnnnnnnnnnnnnnnnnnnnnnnnnnnnnnnnnnnnnnnnnnnnnnnnnnnnnnnnnnnnnnnnnnnnnnnnnnnnnnnnnnnnnnnnnnnnnnnnnnnnnnnnnnnnnnnnnnnnnnnnnnnnnnnnnnnnnnnnnnnnnnnnnnnnnnnnnnnnnnnnnnnnnnnnnnnnnnnnnnnnnnnnnnnnnnnnnnnnnnnnnnnnnnnnnnnnnnnnnnnnnnnnnnnnnnnnnnnnnnnnnnnnnnnnnnnnnnnnnnnnnnnnnnnnnnnnnnnnnnnnnnnnnnnnnnnnnnnnnnnnnnnnnnnnnnnnnnnnnnnnnnnnnnnnnnnnnnnnnnnnnnnnnnnnnnnnnnnnnnnnnnnnnnnnnnnnnnnnnnnnnnnnnnnnnnnnnnnnnnnnnnnnnnnnnnnnnnnnnnnnnnnnnnnnnnnnnnnnnnnnnnnnnnnnnnnnnnnnnnnnnnnnnnnnnnnnnnnnnnnnnnnnnnnnnnnnnnnnnnnnnnnnnnnnnnnnnnnnnnnnnnnnnnnnnnnnnnnnnnnnnnnnnnnnnnnnnnnnnnnnnnnnnnnnnnnnnnnnnnnnnnnnnnnnnnnnnnnnnnnnnnnnnnnnnnnnnnnnnnnnnnnnnnnnnnnnnnnnnnnnnnnnnnnnnnnnnnnnnnnnnnnnnnnnnnnnnnnnnnnnnnnnnnnnnnnnnnnnnnnnnnnnnnnnnnnnnnnnnnnnnnnnnnnnnnnnnnnnnnnnnnnnnnnnnnnnnnnnnnnnnnnnnnnnnnnnnnnnnnnnnnnnnnnnnnnnnnnnnnnnnnnnnnnnnnnnnnnnnnnnnnnnnnnnnnnnnnnnnnnnnnnnnnnnnnnnnnnnnnnnnnnnnnnnnnnnnnnnnnnnnnnnnnnnnnnnnnnnnnnnnnnnnnnnnnnnnnnnnnnnnnnnnnnnnnnnnnnnnnnnnnnnnnnnnnnnnnnnnnnnnnnnnnnnnnnnnnnnnnnnnnnnnnnnnnnnnnnnnnnnnnnnnnnnnnnnnnnnnnnnnnnnnnnnnnnnnnnnnnnnnnnnnnnnnnnnnnnnnnnnnnnnnnnnnnnnnnnnnnnnnnnnnnnnnnnnnnnnnnnnnnnnnnnnnnnnnnnnnnnnnnnnnnnnnnnnnnnnnnnnnnnnnnnnnnnnnnnnnnnnnnnnnnnnnnnnnnnnnnnnnnnnnnnnnnnnnnnnnnnnnnnnnnnnnnnnnnnnnnnnnnnnnnnnnnnnnnnnnnnnnnnnnnnnnnnnnnnnnnnnnnnnnnnnnnnnnnnnnnnnnnnnnnnnnnnnnnnnnnnnnnnnnnnnnnnnnnnnnnnnnnnnnnnnnnnnnnnnnnnnnnnnnnnnnnnnnnnnnnnnnnnnnnnnnnnnnnnnnnnnnnnnnnnnnnnnnnnnnnnnnnnnnnnnnnnnnnnnnnnnnnnnnnnnnnnnnnnnnnnnnnnnnnnnnnnnnnnnnnnnnnnnnnnnnnnnnnnnnnnnnnnnnnnnnnnnnnnnnnnnnnnnnnnnnnnnnnnnnnnnnnnnnnnnnnnnnnnnnnnnnnnnnnnnnnnnnnnnnnnnnnnnnnnnnnnnnnnnnnnnnnnnnnnnnnnnnnnnnnnnnnnnnnnnnnnnnnnnnnnnnnnnnnnnnnnnnnnnnnnnnnnnnnnnnnnnnnnnnnnnnnnnnnnnnnnnnnnnnnnnnnnnnnnnnnnnnnnnnnnnnnnnnnnnnnnnnnnnnnnnnnnnnnnnnnnnnnnnnnnnnnnnnnnnnnnnnnnnnnnnnnnnnnnnnnnnnnnnnnnnnnnnnnnnnnnnnnnnnnnnnnnnnnnnnnnnnnnnnnnnnnnnnnnnnnnnnnnnnnnnnnnnnnnnnnnnnnnnnnnnnnnnnnnnnnnnnnnnnnnnnnnnnnnnnnnnnnnnnnnnnnnnnnnnnnnnnnnnnnnnnnnnnnnnnnnnnnnnnnnnnnnnnnnnnnnnnnnnnnnnnnnnnnnnnnnnnnnnnnnnnnnnnnnnnnnnnnnnnnnnnnnnnnnnnnnnnnnnnnnnnnnnnnnnnnnnnnnnnnnnnnnnnnnnnnnnnnnnnnnnnnnnnnnnnnnnnnnnnnnnnnnnnnnnnnnnnnnnnnnnnnnnnnnnnnnnnnnnnnnnnnnnnnnnnnnnnnnnnnnnnnnnnnnnnnnnnnnnnnnnnnnnnnnnnnnnnnnnnnnnnnnnnnnnnnnnnnnnnnnnnnnnnnnnnnnnnnnnnnnnnnnnnnnnnnnnnnnnnnnnnnnnnnnnnnnnnnnnnnnnnnnnnnnnnnnnnnnnnnnnnnnnnnnnnnnnnnnnnnnnnnnnnnnnnnnnnnnnnnnnnnnnnnnnnnnnnnnnnnnnnnnnnnnnnnnnnnnnnnnnnnnnnnnnnnnnnnnnnnnnnnnnnnnnnnnnnnnnnnnnnnnnnnnnnnnnnnnnnnnnnnnnnnnnnnnnnnnnnnnnnnnnnnnnnnnnnnnnnnnnnnnnnnnnnnnnnnnnnnnnnnnnnnnnnnnnnnnnnnnnnnnnnnnnnnnnnnnnnnnnnnnnnnnnnnnnnnnnnnnnnnnnnnnnnnnnnnnnnnnnnnnnnnnnnnnnnnnnnnnnnnnnnnnnnnnnnnnnnnnnnnnnnnnnnnnnnnnnnnnnnnnnnnnnnnnnnnnnnnnnnnnnnnnnnnnnnnnnnnnnnnnnnnnnnnnnnnnnnnnnnnnnnnnnnnnnnnnnnnnnnnnnnnnnnnnnnnnnnnnnnnnnnnnnnnnnnnnnnnnnnnnnnnnnnnnnnnnnnnnnnnnnnnnnnnnnnnnnnnnnnnnnnnnnnnnnnnnnnnnnnnnnnnnnnnnnnnnnnnnnnnnnnnnnnnnnnnnnnnnnnnnnnnnnnnnnnnnnnnnnnnnnnnnnnnnnnnnnnnnnnnnnnnnnnnnnnnnnnnnnnnnnnnnnnnnnnnnnnnnnnnnnnnnnnnnnnnnnnnnnnnnnnnnnnnnnnnnnnnnnnnnnnnnnnnnnnnnnnnnnnnnnnnnnnnnnnnnnnnnnnnnnnnnnnnnnnnnnnnnnnnnnnnnnnnnnnnnnnnnnnnnnnnnnnnnnnnnnnnnnnnnnnnnnnnnnnnnnnnnnnnnnnnnnnnnnnnnnnnnnnnnnnnnnnnnnnnnnnnnnnnnnnnnnnnnnnnnnnnnnnnnnnnnnnnnnnnnnnnnnnnnnnnnnnnnnnnnnnnnnnnnnnnnnnnnnnnnnnnnnnnnnnnnnnnnnnnnnnnnnnnnnnnnnnnnnnnnnnnnnnnnnnnnnnnnnnnnnnnnnnnnnnnnnnnnnnnnnnnnnnnnnnnnnnnnnnnnnnnnnnnnnnnnnnnnnnnnnnnnnnnnnnnnnnnnnnnnnnnnnnnnnnnnnnnnnnnnnnnnnnnnnnnnnnnnnnnnnnnnnnnnnnnnnnnnnnnnnnnnnnnnnnnnnnnnnnnnnnnnnnnnnnnnnnnnnnnnnnnnnnnnnnnnnnnnnnnnnnnnnnnnnnnnnnnnnnnnnnnnnnnnnnnnnnnnnnnnnnnnnnnnnnnnnnnnnnnnnnnnnnnnnnnnnnnnnnnnnnnnnnnnnnnnnnnnnnnnnnnnnnnnnnnnnnnnnnnnnnnnnnnnnnnnnnnnnnnnnnnnnnnnnnnnnnnnnnnnnnnnnnnnnnnnnnnnnnnnnnnnnnnnnnnnnnnnnnnnnnnnnnnnnnnnnnnnnnnnnnnnnnnnnnnnnnnnnnnnnnnnnnnnnnnnnnnnnnnnnnnnnnnnnnnnnnnnnnnnnnnnnnnnnnnnnnnnnnnnnnnnnnnnnnnnnnnnnnnnnnnnnnnnnnnnnnnnnnnnnnnnnnnnnnnnnnnnnnnnnnnnnnnnnnnnnnnnnnnnnnnnnnnnnnnnnnnnnnnnnnnnnnnnnnnnnnnnnnnnnnnnnnnnnnnnnnnnnnnnnnnnnnnnnnnnnnnnnnnnnnnnnnnnnnnnnnnnnnnnnnnnnnnnnnnnnnnnnnnnnnnnnnnnnnnnnnnnnnnnnnnnnnnnnnnnnnnnnnnnnnnnnnnnnnnnnnnnnnnnnnnnnnnnnnnnnnnnnnnnnnnnnnnnnnnnnnnnnnnnnnnnnnnnnnnnnnnnnnnnnnnnnnnnnnnnnnnnnnnnnnnnnnnnnnnnnnnnnnnnnnnnnnnnnnnnnnnnnnnnnnnnnnnnnnnnnnnnnnnnnnnnnnnnnnnnnnnnnnnnnnnnnnnnnnnnnnnnnnnnnnnnnnnnnnnnnnnnnnnnnnnnnnnnnnnnnnnnnnnnnnnnnnnnnnnnnnnnnnnnnnnnnnnnnnnnnnnnnnnnnnnnnnnnnnnnnnnnnnnnnnnnnnnnnnnnnnnnnnnnnnnnnnnnnnnnnnnnnnnnnnnnnnnnnnnnnnnnnnnnnnnnnnnnnnnnnnnnnnnnnnnnnnnnnnnnnnnnnnnnnnnnnnnnnnnnnnnnnnnnnnnnnnnnnnnnnnnnnnnnnnnnnnnnnnnnnnnnnnnnnnnnnnnnnnnnnnnnnnnnnnnnnnnnnnnnnnnnnnnnnnnnnnnnnnnnnnnnnnnnnnnnnnnnnnnnnnnnnnnnnnnnnnnnnnnnnnnnnnnnnnnnnnnnnnnnnnnnnnnnnnnnnnnnnnnnnnnnnnnnnnnnnnnnnnnnnnnnnnnnnnnnnnnnnnnnnnnnnnnnnnnnnnnnnnnnnnnnnnnnnnnnnnnnnnnnnnnnnnnnnnnnnnnnnnnnnnnnnnnnnnnnnnnnnnnnnnnnnnnnnnnnnnnnnnnnnnnnnnnnnnnnnnnnnnnnnnnnnnnnnnnnnnnnnnnnnnnnnnnnnnnnnnnnnnnnnnnnnnnnnnnnnnnnnnnnnnnnnnnnnnnnnnnnnnnnnnnnnnnnnnnnnnnnnnnnnnnnnnnnnnnnnnnnnnnnnnnnnnnnnnnnnnnnnnnnnnnnnnnnnnnnnnnnnnnnnnnnnnnnnnnnnnnnnnnnnnnnnnnnnnnnnnnnnnnnnnnnnnnnnnnnnnnnnnnnnnnnnnnnnnnnnnnnnnnnnnnnnnnnnnnnnnnnnnnnnnnnnnnnnnnnnnnnnnnnnnnnnnnnnnnnnnnnnnnnnnnnnnnnnnnnnnnnnnnnnnnnnnnnnnnnnnnnnnnnnnnnnnnnnnnnnnnnnnnnnnnnnnnnnnnnnnnnnnnnnnnnnnnnnnnnnnnnnnnnnnnnnnnnnnnnnnnnnnnnnnnnnnnnnnnnnnnnnnnnnnnnnnnnnnnnnnnnnnnnnnnnnnnnnnnnnnnnnnnnnnnnnnnnnnnnnnnnnnnnnnnnnnnnnnnnnnnnnnnnnnnnnnnnnnnnnnnnnnnnnnnnnnnnnnnnnnnnnnnnnnnnnnnnnnnnnnnnnnnnnnnnnnnnnnnnnnnnnnnnnnnnnnnnnnnnnnnnnnnnnnnnnnnnnnnnnnnnnnnnnnnnnnnnnnnnnnnnnnnnnnnnnnnnnnnnnnnnnnnnnnnnnnnnnnnnnnnnnnnnnnnnnnnnnnnnnnnnnnnnnnnnnnnnnnnnnnnnnnnnnnnnnnnnnnnnnnnnnnnnnnnnnnnnnnnnnnnnnnnnnnnnnnnnnnnnnnnnnnnnnnnnnnnnnnnnnnnnnnnnnnnnnnnnnnnnnnnnnnnnnnnnnnnnnnnnnnnnnnnnnnnnnnnnnnnnnnnnnnnnnnnnnnnnnnnnnnnnnnnnnnnnnnnnnnnnnnnnnnnnnnnnnnnnnnnnnnnnnnnnnnnnnnnnnnnnnnnnnnnnnnnnnnnnnnnnnnnnnnnnnnnnnnnnnnnnnnnnnnnnnnnnnnnnnnnnnnnnnnnnnnnnnnnnnnnnnnnnnnnnnnnnnnnnnnnnnnnnnnnnnnnnnnnnnnnnnnnnnnnnnnnnnnnnnnnnnnnnnnnnnnnnnnnnnnnnnnnnnnnnnnnnnnnnnnnnnnnnnnnnnnnnnnnnnnnnnnnnnnnnnnnnnnnnnnnnnnnnnnnnnnnnnnnnnnnnnnnnnnnnnnnnnnnnnnnnnnnnnnnnnnnnnnnnnnnnnnnnnnnnnnnnnnnnnnnnnnnnnnnnnnnnnnnnnnnnnnnnnnnnnnnnnnnnnnnnnnnnnnnnnnnnnnnnnnnnnnnnnnnnnnnnnnnnnnnnnnnnnnnnnnnnnnnnnnnnnnnnnnnnnnnnnnnnnnnnnnnnnnnnnnnnnnnnnnnnnnnnnnnnnnnnnnnnnnnnnnnnnnnnnnnnnnnnnnnnnnnnnnnnnnnnnnnnnnnnnnnnnnnnnnnnnnnnnnnnnnnnnnnnnnnnnnnnnnnnnnnnnnnnnnnnnnnnnnnnnnnnnnnnnnnnnnnnnnnnnnnnnnnnnnnnnnnnnnnnnnnnnnnnnnnnnnnnnnnnnnnnnnnnnnnnnnnnnnnnnnnnnnnnnnnnnnnnnnnnnnnnnnnnnnnnnnnnnnnnnnnnnnnnnnnnnnnnnnnnnnnnnnnnnnnnnnnnnnnnnnnnnnnnnnnnnnnnnnnnnnnnnnnnnnnnnnnnnnnnnnnnnnnnnnnnnnnnnnnnnnnnnnnnnnnnnnnnnnnnnnnnnnnnnnnnnnnnnnnnnnnnnnnnnnnnnnnnnnnnnnnnnnnnnnnnnnnnnnnnnnnnnnnnnnnnnnnnnnnnnnnnnnnnnnnnnnnnnnnnnnnnnnnnnnnnnnnnnnnnnnnnnnnnnnnnnnnnnnnnnnnnnnnnnnnnnnnnnnnnnnnnnnnnnnnnnnnnnnnnnnnnnnnnnnnnnnnnnnnnnnnnnnnnnnnnnnnnnnnnnnnnnnnnnnnnnnnnnnnnnnnnnnnnnnnnnnnnnnnnnnnnnnnnnnnnnnnnnnnnnnnnnnnnnnnnnnnnnnnnnnnnnnnnnnnnnnnnnnnnnnnnnnnnnnnnnnnnnnnnnnnnnnnnnnnnnnnnnnnnnnnnnnnnnnnnnnnnnnnnnnnnnnnnnnnnnnnnnnnnnnnnnnnnnnnnnnnnnnnnnnnnnnnnnnnnnnnnnnnnnnnnnnnnnnnnnnnnnnnnnnnnnnnnnnnnnnnnnnnnnnnnnnnnnnnnnnnnnnnnnnnnnnnnnnnnnnnnnnnnnnnnnnnnnnnnnnnnnnnnnnnnnnnnnnnnnnnnnnnnnnnnnnnnnnnnnnnnnnnnnnnnnnnnnnnnnnnnnnnnnnnnnnnnnnnnnnnnnnnnnnnnnnnnnnnnnnnnnnnnnnnnnnnnnnnnnnnnnnnnnnnnnnnnnnnnnnnnnnnnnnnnnnnnnnnnnnnnnnnnnnnnnnnnnnnnnnnnnnnnnnnnnnnnnnnnnnnnnnnnnnnnnnnnnnnnnnnnnnnnnnnnnnnnnnnnnnnnnnnnnnnnnnnnnnnnnnnnnnnnnnnnnnnnnnnnnnnnnnnnnnnnnnnnnnnnnnnnnnnnnnnnnnnnnnnnnnnnnnnnnnnnnnnnnnnnnnnnnnnnnnnnnnnnnnnnnnnnnnnnnnnnnnnnnnnnnnnnnnnnnnnnnnnnnnnnnnnnnnnnnnnnnnnnnnnnnnnnnnnnnnnnnnnnnnnnnnnnnnnnnnnnnnnnnnnnnnnnnnnnnnnnnnnnnnnnnnnnnnnnnnnnnnnnnnnnnnnnnnnnnnnnnnnnnnnnnnnnnnnnnnnnnnnnnnnnnnnnnnnnnnnnnnnnnnnnnnnnnnnnnnnnnnnnnnnnnnnnnnnnnnnnnnnnnnnnnnnnnnnnnnnnnnnnnnnnnnnnnnnnnnnnnnnnnnnnnnnnnnnnnnnnnnnnnnnnnnnnnnnnnnnnnnnnnnnnnnnnnnnnnnnnnnnnnnnnnnnnnnnnnnnnnnnnnnnnnnnnnnnnnnnnnnnnnnnnnnnnnnnnnnnnnnnnnnnnnnnnnnnnnnnnnnnnnnnnnnnnnnnnnnnnnnnnnnnnnnnnnnnnnnnnnnnnnnnnnnnnnnnnnnnnnnnnnnnnnnnnnnnnnnnnnnnnnnnnnnnnnnnnnnnnnnnnnnnnnnnnnnnnnnnnnnnnnnnnnnnnnnnnnnnnnnnnnnnnnnnnnnnnnnnnnnnnnnnnnnnnnnnnnnnnnnnnnnnnnnnnnnnnnnnnnnnnnnnnnnnnnnnnnnnnnnnnnnnnnnnnnnnnnnnnnnnnnnnnnnnnnnnnnnnnnnnnnnnnnnnnnnnnnnnnnnnnnnnnnnnnnnnnnnnnnnnnnnnnnnnnnnnnnnnnnnnnnnnnnnnnnnnnnnnnnnnnnnnnnnnnnnnnnnnnnnnnnnnnnnnnnnnnnnnnnnnnnnnnnnnnnnnnnnnnnnnnnnnnnnnnnnnnnnnnnnnnnnnnnnnnnnnnnnnnnnnnnnnnnnnnnnnnnnnnnnnnnnnnnnnnnnnnnnnnnnnnnnnnnnnnnnnnnnnnnnnnnnnnnnnnnnnnnnnnnnnnnnnnnnnnnnnnnnnnnnnnnnnnnnnnnnnnnnnnnnnnnnnnnnnnnnnnnnnnnnnnnnnnnnnnnnnnnnnnnnnnnnnnnnnnnnnnnnnnnnnnnnnnnnnnnnnnnnnnnnnnnnnnnnnnnnnnnnnnnnnnnnnnnnnnnnnnnnnnnnnnnnnnnnnnnnnnnnnnnnnnnnnnnnnnnnnnnnnnnnnnnnnnnnnnnnnnnnnnnnnnnnnnnnnnnnnnnnnnnnnnnnnnnnnnnnnnnnnnnnnnnnnnnnnnnnnnnnnnnnnnnnnnnnnnnnnnnnnnnnnnnnnnnnnnnnnnnnnnnnnnnnnnnnnnnnnnnnnnnnnnnnnnnnnnnnnnnnnnnnnnnnnnnnnnnnnnnnnnnnnnnnnnnnnnnnnnnnnnnnnnnnnnnnnnnnnnnnnnnnnnnnnnnnnnnnnnnnnnnnnnnnnnnnnnnnnnnnnnnnnnnnnnnnnnnnnnnnnnnnnnnnnnnnnnnnnnnnnnnnnnnnnnnnnnnnnnnnnnnnnnnnnnnnnnnnnnnnnnnnnnnnnnnnnnnnnnnnnnnnnnnnnnnnnnnnnnnnnnnnnnnnnnnnnnnnnnnnnnnnnnnnnnnnnnnnnnnnnnnnnnnnnnnnnnnnnnnnnnnnnnnnnnnnnnnnnnnnnnnnnnnnnnnnnnnnnnnnnnnnnnnnnnnnnnnnnnnnnnnnnnnnnnnnnnnnnnnnnnnnnnnnnnnnnnnnnnnnnnnnnnnnnnnnnnnnnnnnnnnnnnnnnnnnnnnnnnnnnnnnnnnnnnnnnnnnnnnnnnnnnnnnnnnnnnnnnnnnnnnnnnnnnnnnnnnnnnnnnnnnnnnnnnnnnnnnnnnnnnnnnnnnnnnnnnnnnnnnnnnnnnnnnnnnnnnnnnnnnnnnnnnnnnnnnnnnnnnnnnnnnnnnnnnnnnnnnnnnnnnnnnnnnnnnnnnnnnnnnnnnnnnnnnnnnnnnnnnnnnnnnnnnnnnnnnnnnnnnnnnnnnnnnnnnnnnnnnnnnnnnnnnnnnnnnnnnnnnnnnnnnnnnnnnnnnnnnnnnnnnnnnnnnnnnnnnnnnnnnnnnnnnnnnnnnnnnnnnnnnnnnnnnnnnnnnnnnnnnnnnnnnnnnnnnnnnnnnnnnnnnnnnnnnnnnnnnnnnnnnnnnnnnnnnnnnnnnnnnnnnnnnnnnnnnnnnnnnnnnnnnnnnnnnnnnnnnnnnnnnnnnnnnnnnnnnnnnnnnnnnnnnnnnnnnnnnnnnnnnnnnnnnnnnnnnnnnnnnnnnnnnnnnnnnnnnnnnnnnnnnnnnnnnnnnnnnnnnnnnnnnnnnnnnnnnnnnnnnnnnnnnnnnnnnnnnnnnnnnnnnnnnnnnnnnnnnnnnnnnnnnnnnnnnnnnnnnnnnnnnnnnnnnnnnnnnnnnnnnnnnnnnnnnnnnnnnnnnnnnnnnnnnnnnnnnnnnnnnnnnnnnnnnnnnnnnnnnnnnnnnnnnnnnnnnnnnnnnnnnnnnnnnnnnnnnnnnnnnnnnnnnnnnnnnnnnnnnnnnnnnnnnnnnnnnnnnnnnnnnnnnnnnnnnnnnnnnnnnnnnnnnnnnnnnnnnnnnnnnnnnnnnnnnnnnnnnnnnnnnnnnnnnnnnnnnnnnnnnnnnnnnnnnnnnnnnnnnnnnnnnnnnnnnnnnnnnnnnnnnnnnnnnnnnnnnnnnnnnnnnnnnnnnnnnnnnnnnnnnnnnnnnnnnnnnnnnnnnnnnnnnnnnnnnnnnnnnnnnnnnnnnnnnnnnnnnnnnnnnnnnnnnnnnnnnnnnnnnnnnnnnnnnnnnnnnnnnnnnnnnnnnnnnnnnnnnnnnnnnnnnnnnnnnnnnnnnnnnnnnnnnnnnnnnnnnnnnnnnnnnnnnnnnnnnnnnnnnnnnnnnnnnnnnnnnnnnnnnnnnnnnnnnnnnnnnnnnnnnnnnnnnnnnnnnnnnnnnnnnnnnnnnnnnnnnnnnnnnnnnnnnnnnnnnnnnnnnnnnnnnnnnnnnnnnnnnnnnnnnnnnnnnnnnnnnnnnnnnnnnnnnnnnnnnnnnnnnnnnnnnnnnnnnnnnnnnnnnnnnnnnnnnnnnnnnnnnnnnnnnnnnnnnnnnnnnnnnnnnnnnnnnnnnnnnnnnnnnnnnnnnnnnnnnnnnnnnnnnnnnnnnnnnnnnnnnnnnnnnnnnnnnnnnnnnnnnnnnnnnnnnnnnnnnnnnnnnnnnnnnnnnnnnnnnnnnnnnnnnnnnnnnnnnnnnnnnnnnnnnnnnnnnnnnnnnnnnnnnnnnnnnnnnnnnnnnnnnnnnnnnnnnnnnnnnnnnnnnnnnnnnnnnnnnnnnnnnnnnnnnnnnnnnnnnnnnnnnnnnnnnnnnnnnnnnnnnnnnnnnnnnnnnnnnnnnnnnnnnnnnnnnnnnnnnnnnnnnnnnnnnnnnnnnnnnnnnnnnnnnnnnnnnnnnnnnnnnnnnnnnnnnnnnnnnnnnnnnnnnnnnnnnnnnnnnnnnnnnnnnnnnnnnnnnnnnnnnnnnnnnnnnnnnnnnnnnnnnnnnnnnnnnnnnnnnnnnnnnnnnnnnnnnnnnnnnnnnnnnnnnnnnnnnnnnnnnnnnnnnnnnnnnnnnnnnnnnnnnnnnnnnnnnnnnnnnnnnnnnnnnnnnnnnnnnnnnnnnnnnnnnnnnnnnnnnnnnnnnnnnnnnnnnnnnnnnnnnnnnnnnnnnnnnnnnnnnnnnnnnnnnnnnnnnnnnnnnnnnnnnnnnnnnnnnnnnnnnnnnnnnnnnnnnnnnnnnnnnnnnnnnnnnnnnnnnnnnnnnnnnnnnnnnnnnnnnnnnnnnnnnnnnnnnnnnnnnnnnnnnnnnnnnnnnnnnnnnnnnnnnnnnnnnnnnnnnnnnnnnnnnnnnnnnnnnnnnnnnnnnnnnnnnnnnnnnnnnnnnnnnnnnnnnnnnnnnnnnnnnnnnnnnnnnnnnnnnnnnnnnnnnnnnnnnnnnnnnnnnnnnnnnnnnnnnnnnnnnnnnnnnnnnnnnnnnnnnnnnnnnnnnnnnnnnnnnnnnnnnnnnnnnnnnnnnnnnnnnnnnnnnnnnnnnnnnnnnnnnnnnnnnnnnnnnnnnnnnnnnnnnnnnnnnnnnnnnnnnnnnnnnnnnnnnnnnnnnnnnnnnnnnnnnnnnnnnnnnnnnnnnnnnnnnnnnnnnnnnnnnnnnnnnnnnnnnnnnnnnnnnnnnnnnnnnnnnnnnnnnnnnnnnnnnnnnnnnnnnnnnnnnnnnnnnnnnnnnnnnnnnnnnnnnnnnnnnnnnnnnnnnnnnnnnnnnnnnnnnnnnnnnnnnnnnnnnnnnnnnnnnnnnnnnnnnnnnnnnnnnnnnnnnnnnnnnnnnnnnnnnnnnnnnnnnnnnnnnnnnnnnnnnnnnnnnnnnnnnnnnnnnnnnnnnnnnnnnnnnnnnnnnnnnnnnnnnnnnnnnnnnnnnnnnnnnnnnnnnnnnnnnnnnnnnnnnnnnnnnnnnnnnnnnnnnnnnnnnnnnnnnnnnnnnnnnnnnnnnnnnnnnnnnnnnnnnnnnnnnnnnnnnnnnnnnnnnnnnnnnnnnnnnnnnnnnnnnnnnnnnnnnnnnnnnnnnnnnnnnnnnnnnnnnnnnnnnnnnnnnnnnnnnnnnnnnnnnnnnnnnnnnnnnnnnnnnnnnnnnnnnnnnnnnnnnnnnnnnnnnnnnnnnnnnnnnnnnnnnnnnnnnnnnnnnnnnnnnnnnnnnnnnnnnnnnnnnnnnnnnnnnnnnnnnnnnnnnnnnnnnnnnnnnnnnnnnnnnnnnnnnnnnnnnnnnnnnnnnnnnnnnnnnnnnnnnnnnnnnnnnnnnnnnnnnnnnnnnnnnnnnnnnnnnnnnnnnnnnnnnnnnnnnnnnnnnnnnnnnnnnnnnnnnnnnnnnnnnnnnnnnnnnnnnnnnnnnnnnnnnnnnnnnnnnnnnnnnnnnnnnnnnnnnnnnnnnnnnnnnnnnnnnnnnnnnnnnnnnnnnnnnnnnnnnnnnnnnnnnnnnnnnnnnnnnnnnnnnnnnnnnnnnnnnnnnnnnnnnnnnnnnnnnnnnnnnnnnnnnnnnnnnnnnnnnnnnnnnnnnnnnnnnnnnnnnnnnnnnnnnnnnnnnnnnnnnnnnnnnnnnnnnnnnnnnnnnnnnnnnnnnnnnnnnnnnnnnnnnnnnnnnnnnnnnnnnnnnnnnnnnnnnnnnnnnnnnnnnnnnnnnnnnnnnnnnnnnnnnnnnnnnnnnnnnnnnnnnnnnnnnnnnnnnnnnnnnnnnnnnnnnnnnnnnnnnnnnnnnnnnnnnnnnnnnnnnnnnnnnnnnnnnnnnnnnnnnnnnnnnnnnnnnnnnnnnnnnnnnnnnnnnnnnnnnnnnnnnnnnnnnnnnnnnnnnnnnnnnnnnnnnnnnnnnnnnnnnnnnnnnnnnnnnnnnnnnnnnnnnnnnnnnnnnnnnnnnnnnnnnnnnnnnnnnnnnnnnnnnnnnnnnnnnnnnnnnnnnnnnnnnnnnnnnnnnnnnnnnnnnnnnnnnnnnnnnnnnnnnnnnnnnnnnnnnnnnnnnnnnnnnnnnnnnnnnnnnnnnnnnnnnnnnnnnnnnnnnnnnnnnnnnnnnnnnnnnnnnnnnnnnnnnnnnnnnnnnnnnnnnnnnnnnnnnnnnnnnnnnnnnnnnnnnnnnnnnnnnnnnnnnnnnnnnnnnnnnnnnnnnnnnnnnnnnnnnnnnnnnnnnnnnnnnnnnnnnnnnnnnnnnnnnnnnnnnnnnnnnnnnnnnnnnnnnnnnnnnnnnnnnnnnnnnnnnnnnnnnnnnnnnnnnnnnnnnnnnnnnnnnnnnnnnnnnnnnnnnnnnnnnnnnnnnnnnnnnnnnnnnnnnnnnnnnnnnnnnnnnnnnnnnnnnnnnnnnnnnnnnnnnnnnnnnnnnnnnnnnnnnnnnnnnnnnnnnnnnnnnnnnnnnnnnnnnnnnnnnnnnnnnnnnnnnnnnnnnnnnnnnnnnnnnnnnnnnnnnnnnnnnnnnnnnnnnnnnnnnnnnnnnnnnnnnnnnnnnnnnnnnnnnnnnnnnnnnnnnnnnnnnnnnnnnnnnnnnnnnnnnnnnnnnnnnnnnnnnnnnnnnnnnnnnnnnnnnnnnnnnnnnnnnnnnnnnnnnnnnnnnnnnnnnnnnnnnnnnnnnnnnnnnnnnnnnnnnnnnnnnnnnnnnnnnnnnnnnnnnnnnnnnnnnnnnnnnnnnnnnnnnnnnnnnnnnnnnnnnnnnnnnnnnnnnnnnnnnnnnnnnnnnnnnnnnnnnnnnnnnnnnnnnnnnnnnnnnnnnnnnnnnnnnnnnnnnnnnnnnnnnnnnnnnnnnnnnnnnnnnnnnnnnnnnnnnnnnnnnnnnnnnnnnnnnnnnnnnnnnnnnnnnnnnnnnnnnnnnnnnnnnnnnnnnnnnnnnnnnnnnnnnnnnnnnnnnnnnnnnnnnnnnnnnnnnnnnnnnnnnnnnnnnnnnnnnnnnnnnnnnnnnnnnnnnnnnnnnnnnnnnnnnnnnnnnnnnnnnnnnnnnnnnnnnnnnnnnnnnnnnnnnnnnnnnnnnnnnnnnnnnnnnnnnnnnnnnnnnnnnnnnnnnnnnnnnnnnnnnnnnnnnnnnnnnnnnnnnnnnnnnnnnnnnnnnnnnnnnnnnnnnnnnnnnnnnnnnnnnnnnnnnnnnnnnnnnnnnnnnnnnnnnnnnnnnnnnnnnnnnnnnnnnnnnnnnnnnnnnnnnnnnnnnnnnnnnnnnnnnnnnnnnnnnnnnnnnnnnnnnnnnnnnnnnnnnnnnnnnnnnnnnnnnnnnnnnnnnnnnnnnnnnnnnnnnnnnnnnnnnnnnnnnnnnnnnnnnnnnnnnnnnnnnnnnnnnnnnnnnnnnnnnnnnnnnnnnnnnnnnnnnnnnnnnnnnnnnnnnnnnnnnnnnnnnnnnnnnnnnnnnnnnnnnnnnnnnnnnnnnnnnnnnnnnnnnnnnnnnnnnnnnnnnnnnnnnnnnnnnnnnnnnnnnnnnnnnnnnnnnnnnnnnnnnnnnnnnnnnnnnnnnnnnnnnnnnnnnnnnnnnnnnnnnnnnnnnnnnnnnnnnnnnnnnnnnnnnnnnnnnnnnnnnnnnnnnnnnnnnnnnnnnnnnnnnnnnnnnnnnnnnnnnnnnnnnnnnnnnnnnnnnnnnnnnnnnnnnnnnnnnnnnnnnnnnnnnnnnnnnnnnnnnnnnnnnnnnnnnnnnnnnnnnnnnnnnnnnnnnnnnnnnnnnnnnnnnnnnnnnnnnnnnnnnnnnnnnnnnnnnnnnnnnnnnnnnnnnnnnnnnnnnnnnnnnnnnnnnnnnnnnnnnnnnnnnnnnnnnnnnnnnnnnnnnnnnnnnnnnnnnnnnnnnnnnnnnnnnnnnnnnnnnnnnnnnnnnnnnnnnnnnnnnnnnnnnnnnnnnnnnnnnnnnnnnnnnnnnnnnnnnnnnnnnnnnnnnnnnnnnnnnnnnnnnnnnnnnnnnnnnnnnnnnnnnnnnnnnnnnnnnnnnnnnnnnnnnnnnnnnnnnnnnnnnnnnnnnnnnnnnnnnnnnnnnnnnnnnnnnnnnnnnnnnnnnnnnnnnnnnnnnnnnnnnnnnnnnnnnnnnnnnnnnnnnnnnnnnnnnnnnnnnnnnnnnnnnnnnnnnnnnnnnnnnnnnnnnnnnnnnnnnnnnnnnnnnnnnnnnnnnnnnnnnnnnnnnnnnnnnnnnnnnnnnnnnnnnnnnnnnnnnnnnnnnnnnnnnnnnnnnnnnnnnnnnnnnnnnnnnnnnnnnnnnnnnnnnnnnnnnnnnnnnnnnnnnnnnnnnnnnnnnnnnnnnnnnnnnnnnnnnnnnnnnnnnnnnnnnnnnnnnnnnnnnnnnnnnnnnnnnnnnnnnnnnnnnnnnnnnnnnnnnnnnnnnnnnnnnnnnnnnnnnnnnnnnnnnnnnnnnnnnnnnnnnnnnnnnnnnnnnnnnnnnnnnnnnnnnnnnnnnnnnnnnnnnnnnnnnnnnnnnnnnnnnnnnnnnnnnnnnnnnnnnnnnnnnnnnnnnnnnnnnnnnnnnnnnnnnnnnnnnnnnnnnnnnnnnnnnnnnnnnnnnnnnnnnnnnnnnnnnnnnnnnnnnnnnnnnnnnnnnnnnnnnnnnnnnnnnnnnnnnnnnnnnnnnnnnnnnnnnnnnnnnnnnnnnnnnnnnnnnnnnnnnnnnnnnnnnnnnnnnnnnnnnnnnnnnnnnnnnnnnnnnnnnnnnnnnnnnnnnnnnnnnnnnnnnnnnnnnnnnnnnnnnnnnnnnnnnnnnnnnnnnnnnnnnnnnnnnnnnnnnnnnnnnnnnnnnnnnnnnnnnnnnnnnnnnnnnnnnnnnnnnnnnnnnnnnnnnnnnnnnnnnnnnnnnnnnnnnnnnnnnnnnnnnnnnnnnnnnnnnnnnnnnnnnnnnnnnnnnnnnnnnnnnnnnnnnnnnnnnnnnnnnnnnnnnnnnnnnnnnnnnnnnnnnnnnnnnnnnnnnnnnnnnnnnnnnnnnnnnnnnnnnnnnnnnnnnnnnnnnnnnnnnnnnnnnnnnnnnnnnnnnnnnnnnnnnnnnnnnnnnnnnnnnnnnnnnnnnnnnnnnnnnnnnnnnnnnnnnnnnnnnnnnnnnnnnnnnnnnnnnnnnnnnnnnnnnnnnnnnnnnnnnnnnnnnnnnnnnnnnnnnnnnnnnnnnnnnnnnnnnnnnnnnnnnnnnnnnnnnnnnnnnnnnnnnnnnnnnnnnnnnnnnnnnnnnnnnnnnnnnnnnnnnnnnnnnnnnnnnnnnnnnnnnnnnnnnnnnnnnnnnnnnnnnnnnnnnnnnnnnnnnnnnnnnnnnnnnnnnnnnnnnnnnnnnnnnnnnnnnnnnnnnnnnnnnnnnnnnnnnnnnnnnnnnnnnnnnnnnnnnnnnnnnnnnnnnnnnnnnnnnnnnnnnnnnnnnnnnnnnnnnnnnnnnnnnnnnnnnnnnnnnnnnnnnnnnnnnnnnnnnnnnnnnnnnnnnnnnnnnnnnnnnnnnnnnnnnnnnnnnnnnnnnnnnnnnnnnnnnnnnnnnnnnnnnnnnnnnnnnnnnnnnnnnnnnnnnnnnnnnnnnnnnnnnnnnnnnnnnnnnnnnnnnnnnnnnnnnnnnnnnnnnnnnnnnnnnnnnnnnnnnnnnnnnnnnnnnnnnnnnnnnnnnnnnnnnnnnnnnnnnnnnnnnnnnnnnnnnnnnnnnnnnnnnnnnnnnnnnnnnnnnnnnnnnnnnnnnnnnnnnnnnnnnnnnnnnnnnnnnnnnnnnnnnnnnnnnnnnnnnnnnnnnnnnnnnnnnnnnnnnnnnnnnnnnnnnnnnnnnnnnnnnnnnnnnnnnnnnnnnnnnnnnnnnnnnnnnnnnnnnnnnnnnnnnnnnnnnnnnnnnnnnnnnnnnnnnnnnnnnnnnnnnnnnnnnnnnnnnnnnnnnnnnnnnnnnnnnnnnnnnnnnnnnnnnnnnnnnnnnnnnnnnnnnnnnnnnnnnnnnnnnnnnnnnnnnnnnnnnnnnnnnnnnnnnnnnnnnnnnnnnnnnnnnnnnnnnnnnnnnnnnnnnnnnnnnnnnnnnnnnnnnnnnnnnnnnnnnnnnnnnnnnnnnnnnnnnnnnnnnnnnnnnnnnnnnnnnnnnnnnnnnnnnnnnnnnnnnnnnnnnnnnnnnnnnnnnnnnnnnnnnnnnnnnnnnnnnnnnnnnnnnnnnnnnnnnnnnnnnnnnnnnnnnnnnnnnnnnnnnnnnnnnnnnnnnnnnnnnnnnnnnnnnnnnnnnnnnnnnnnnnnnnnnnnnnnnnnnnnnnnnnnnnnnnnnnnnnnnnnnnnnnnnnnnnnnnnnnnnnnnnnnnnnnnnnnnnnnnnnnnnnnnnnnnnnnnnnnnnnnnnnnnnnnnnnnnnnnnnnnnnnnnnnnnnnnnnnnnnnnnnnnnnnnnnnnnnnnnnnnnnnnnnnnnnnnnnnnnnnnnnnnnnnnnnnnnnnnnnnnnnnnnnnnnnnnnnnnnnnnnnnnnnnnnnnnnnnnnnnnnnnnnnnnnnnnnnnnnnnnnnnnnnnnnnnnnnnnnnnnnnnnnnnnnnnnnnnnnnnnnnnnnnnnnnnnnnnnnnnnnnnnnnnnnnnnnnnnnnnnnnnnnnnnnnnnnnnnnnnnnnnnnnnnnnnnnnnnnnnnnnnnnnnnnnnnnnnnnnnnnnnnnnnnnnnnnnnnnnnnnnnnnnnnnnnnnnnnnnnnnnnnnnnnnnnnnnnnnnnnnnnnnnnnnnnnnnnnnnnnnnnnnnnnnnnnnnnnnnnnnnnnnnnnnnnnnnnnnnnnnnnnnnnnnnnnnnnnnnnnnnnnnnnnnnnnnnnnnnnnnnnnnnnnnnnnnnnnnnnnnnnnnnnnnnnnnnnnnnnnnnnnnnnnnnnnnnnnnnnnnnnnnnnnnnnnnnnnnnnnnnnnnnnnnnnnnnnnnnnnnnnnnnnnnnnnnnnnnnnnnnnnnnnnnnnnnnnnnnnnnnnnnnnnnnnnnnnnnnnnnnnnnnnnnnnnnnnnnnnnnnnnnnnnnnnnnnnnnnnnnnnnnnnnnnnnnnnnnnnnnnnnnnnnnnnnnnnnnnnnnnnnnnnnnnnnnnnnnnnnnnnnnnnnnnnnnnnnnnnnnnnnnnnnnnnnnnnnnnnnnnnnnnnnnnnnnnnnnnnnnnnnnnnnnnnnnnnnnnnnnnnnnnnnnnnnnnnnnnnnnnnnnnnnnnnnnnnnnnnnnnnnnnnnnnnnnnnnnnnnnnnnnnnnnnnnnnnnnnnnnnnnnnnnnnnnnnnnnnnnnnnnnnnnnnnnnnnnnnnnnnnnnnnnnnnnnnnnnnnnnnnnnnnnnnnnnnnnnnnnnnnnnnnnnnnnnnnnnnnnnnnnnnnnnnnnnnnnnnnnnnnnnnnnnnnnnnnnnnnnnnnnnnnnnnnnnnnnnnnnnnnnnnnnnnnnnnnnnnnnnnnnnnnnnnnnnnnnnnnnnnnnnnnnnnnnnnnnnnnnnnnnnnnnnnnnnnnnnnnnnnnnnnnnnnnnnnnnnnnnnnnnnnnnnnnnnnnnnnnnnnnnnnnnnnnnnnnnnnnnnnnnnnnnnnnnnnnnnnnnnnnnnnnnnnnnnnnnnnnnnnnnnnnnnnnnnnnnnnnnnnnnnnnnnnnnnnnnnnnnnnnnnnnnnnnnnnnnnnnnnnnnnnnnnnnnnnnnnnnnnnnnnnnnnnnnnnnnnnnnnnnnnnnnnnnnnnnnnnnnnnnnnnnnnnnnnnnnnnnnnnnnnnnnnnnnnnnnnnnnnnnnnnnnnnnnnnnnnnnnnnnnnnnnnnnnnnnnnnnnnnnnnnnnnnnnnnnnnnnnnnnnnnnnnnnnnnnnnnnnnnnnnnnnnnnnnnnnnnnnnnnnnnnnnnnnnnnnnnnnnnnnnnnnnnnnnnnnnnnnnnnnnnnnnnnnnnnnnnnnnnnnnnnnnnnnnnnnnnnnnnnnnnnnnnnnnnnnnnnnnnnnnnnnnnnnnnnnnnnnnnnnnnnnnnnnnnnnnnnnnnnnnnnnnnnnnnnnnnnnnnnnnnnnnnnnnnnnnnnnnnnnnnnnnnnnnnnnnnnnnnnnnnnnnnnnnnnnnnnnnnnnnnnnnnnnnnnnnnnnnnnnnnnnnnnnnnnnnnnnnnnnnnnnnnnnnnnnnnnnnnnnnnnnnnnnnnnnnnnnnnnnnnnnnnnnnnnnnnnnnnnnnnnnnnnnnnnnnnnnnnnnnnnnnnnnnnnnnnnnnnnnnnnnnnnnnnnnnnnnnnnnnnnnnnnnnnnnnnnnnnnnnnnnnnnnnnnnnnnnnnnnnnnnnnnnnnnnnnnnnnnnnnnnnnnnnnnnnnnnnnnnnnnnnnnnnnnnnnnnnnnnnnnnnnnnnnnnnnnnnnnnnnnnnnnnnnnnnnnnnnnnnnnnnnnnnnnnnnnnnnnnnnnnnnnnnnnnnnnnnnnnnnnnnnnnnnnnnnnnnnnnnnnnnnnnnnnnnnnnnnnnnnnnnnnnnnnnnnnnnnnnnnnnnnnnnnnnnnnnnnnnnnnnnnnnnnnnnnnnnnnnnnnnnnnnnnnnnnnnnnnnnnnnnnnnnnnnnnnnnnnnnnnnnnnnnnnnnnnnnnnnnnnnnnnnnnnnnnnnnnnnnnnnnnnnnnnnnnnnnnnnnnnnnnnnnnnnnnnnnnnnnnnnnnnnnnnnnnnnnnnnnnnnnnnnnnnnnnnnnnnnnnnnnnnnnnnnnnnnnnnnnnnnnnnnnnnnnnnnnnnnnnnnnnnnnnnnnnnnnnnnnnnnnnnnnnnnnnnnnnnnnnnnnnnnnnnnnnnnnnnnnnnnnnnnnnnnnnnnnnnnnnnnnnnnnnnnnnnnnnnnnnnnnnnnnnnnnnnnnnnnnnnnnnnnnnnnnnnnnnnnnnnnnnnnnnnnnnnnnnnnnnnnnnnnnnnnnnnnnnnnnnnnnnnnnnnnnnnnnnnnnnnnnnnnnnnnnnnnnnnnnnnnnnnnnnnnnnnnnnnnnnnnnnnnnnnnnnnnnnnnnnnnnnnnnnnnnnnnnnnnnnnnnnnnnnnnnnnnnnnnnnnnnnnnnnnnnnnnnnnnnnnnnnnnnnnnnnnnnnnnnnnnnnnnnnnnnnnnnnnnnnnnnnnnnnnnnnnnnnnnnnnnnnnnnnnnnnnnnnnnnnnnnnnnnnnnnnnnnnnnnnnnnnnnnnnnnnnnnnnnnnnnnnnnnnnnnnnnnnnnnnnnnnnnnnnnnnnnnnnnnnnnnnnnnnnnnnnnnnnnnnnnnnnnnnnnnnnnnnnnnnnnnnnnnnnnnnnnnnnnnnnnnnnnnnnnnnnnnnnnnnnnnnnnnnnnnnnnnnnnnnnnnnnnnnnnnnnnnnnnnnnnnnnnnnnnnnnnnnnnnnnnnnnnnnnnnnnnnnnnnnnnnnnnnnnnnnnnnnnnnnnnnnnnnnnnnnnnnnnnnnnnnnnnnnnnnnnnnnnnnnnnnnnnnnnnnnnnnnnnnnnnnnnnnnnnnnnnnnnnnnnnnnnnnnnnnnnnnnnnnnnnnnnnnnnnnnnnnnnnnnnnnnnnnnnnnnnnnnnnnnnnnnnnnnnnnnnnnnnnnnnnnnnnnnnnnnnnnnnnnnnnnnnnnnnnnnnnnnnnnnnnnnnnnnnnnnnnnnnnnnnnnnnnnnnnnnnnnnnnnnnnnnnnnnnnnnnnnnnnnnnnnnnnnnnnnnnnnnnnnnnnnnnnnnnnnnnnnnnnnnnnnnnnnnnnnnnnnnnnnnnnnnnnnnnnnnnnnnnnnnnnnnnnnnnnnnnnnnnnnnnnnnnnnnnnnnnnnnnnnnnnnnnnnnnnnnnnnnnnnnnnnnnnnnnnnnnnnnnnnnnnnnnnnnnnnnnnnnnnnnnnnnnnnnnnnnnnnnnnnnnnnnnnnnnnnnnnnnnnnnnnnnnnnnnnnnnnnnnnnnnnnnnnnnnnnnnnnnnnnnnnnnnnnnnnnnnnnnnnnnnnnnnnnnnnnnnnnnnnnnnnnnnnnnnnnnnnnnnnnnnnnnnnnnnnnnnnnnnnnnnnnnnnnnnnnnnnnnnnnnnnnnnnnnnnnnnnnnnnnnnnnnnnnnnnnnnnnnnnnnnnnnnnnnnnnnnnnnnnnnnnnnnnnnnnnnnnnnnnnnnnnnnnnnnnnnnnnnnnnnnnnnnnnnnnnnnnnnnnnnnnnnnnnnnnnnnnnnnnnnnnnnnnnnnnnnnnnnnnnnnnnnnnnnnnnnnnnnnnnnnnnnnnnnnnnnnnnnnnnnnnnnnnnnnnnnnnnnnnnnnnnnnnnnnnnnnnnnnnnnnnnnnnnnnnnnnnnnnnnnnnnnnnnnnnnnnnnnnnnnnnnnnnnnnnnnnnnnnnnnnnnnnnnnnnnnnnnnnnnnnnnnnnnnnnnnnnnnnnnnnnnnnnnnnnnnnnnnnnnnnnnnnnnnnnnnnnnnnnnnnnnnnnnnnnnnnnnnnnnnnnnnnnnnnnnnnnnnnnnnnnnnnnnnnnnnnnnnnnnnnnnnnnnnnnnnnnnnnnnnnnnnnnnnnnnnnnnnnnnnnnnnnnnnnnnnnnnnnnnnnnnnnnnnnnnnnnnnnnnnnnnnnnnnnnnnnnnnnnnnnnnnnnnnnnnnnnnnnnnnnnnnnnnnnnnnnnnnnnnnnnnnnnnnnnnnnnnnnnnnnnnnnnnnnnnnnnnnnnnnnnnnnnnnnnnnnnnnnnnnnnnnnnnnnnnnnnnnnnnnnnnnnnnnnnnnnnnnnnnnnnnnnnnnnnnnnnnnnnnnnnnnnnnnnnnnnnnnnnnnnnnnnnnnnnnnnnnnnnnnnnnnnnnnnnnnnnnnnnnnnnnnnnnnnnnnnnnnnnnnnnnnnnnnnnnnnnnnnnnnnnnnnnnnnnnnnnnnnnnnnnnnnnnnnnnnnnnnnnnnnnnnnnnnnnnnnnnnnnnnnnnnnnnnnnnnnnnnnnnnnnnnnnnnnnnnnnnnnnnnnnnnnnnnnnnnnnnnnnnnnnnnnnnnnnnnnnnnnnnnnnnnnnnnnnnnnnnnnnnnnnnnnnnnnnnnnnnnnnnnnnnnnnnnnnnnnnnnnnnnnnnnnnnnnnnnnnnnnnnnnnnnnnnnnnnnnnnnnnnnnnnnnnnnnnnnnnnnnnnnnnnnnnnnnnnnnnnnnnnnnnnnnnnnnnnnnnnnnnnnnnnnnnnnnnnnnnnnnnnnnnnnnnnnnnnnnnnnnnnnnnnnnnnnnnnnnnnnnnnnnnnnnnnnnnnnnnnnnnnnnnnnnnnnnnnnnnnnnnnnnnnnnnnnnnnnnnnnnnnnnnnnnnnnnnnnnnnnnnnnnnnnnnnnnnnnnnnnnnnnnnnnnnnnnnnnnnnnnnnnnnnnnnnnnnnnnnnnnnnnnnnnnnnnnnnnnnnnnnnnnnnnnnnnnnnnnnnnnnnnnnnnnnnnnnnnnnnnnnnnnnnnnnnnnnnnnnnnnnnnnnnnnnnnnnnnnnnnnnnnnnnnnnnnnnnnnnnnnnnnnnnnnnnnnnnnnnnnnnnnnnnnnnnnnnnnnnnnnnnnnnnnnnnnnnnnnnnnnnnnnnnnnnnnnnnnnnnnnnnnnnnnnnnnnnnnnnnnnnnnnnnnnnnnnnnnnnnnnnnnnnnnnnnnnnnnnnnnnnnnnnnnnnnnnnnnnnnnnnnnnnnnnnnnnnnnnnnnnnnnnnnnnnnnnnnnnnnnnnnnnnnnnnnnnnnnnnnnnnnnnnnnnnnnnnnnnnnnnnnnnnnnnnnnnnnnnnnnnnnnnnnnnnnnnnnnnnnnnnnnnnnnnnnnnnnnnnnnnnnnnnnnnnnnnnnnnnnnnnnnnnnnnnnnnnnnnnnnnnnnnnnnnnnnnnnnnnnnnnnnnnnnnnnnnnnnnnnnnnnnnnnnnnnnnnnnnnnnnnnnnnnnnnnnnnnnnnnnnnnnnnnnnnnnnnnnnnnnnnnnnnnnnnnnnnnnnnnnnnnnnnnnnnnnnnnnnnnnnnnnnnnnnnnnnnnnnnnnnnnnnnnnnnnnnnnnnnnnnnnnnnnnnnnnnnnnnnnnnnnnnnnnnnnnnnnnnnnnnnnnnnnnnnnnnnnnnnnnnnnnnnnnnnnnnnnnnnnnnnnnnnnnnnnnnnnnnnnnnnnnnnnnnnnnnnnnnnnnnnnnnnnnnnnnnnnnnnnnnnnnnnnnnnnnnnnnnnnnnnnnnnnnnnnnnnnnnnnnnnnnnnnnnnnnnnnnnnnnnnnnnnnnnnnnnnnnnnnnnnnnnnnnnnnnnnnnnnnnnnnnnnnnnnnnnnnnnnnnnnnnnnnnnnnnnnnnnnnnnnnnnnnnnnnnnnnnnnnnnnnnnnnnnnnnnnnnnnnnnnnnnnnnnnnnnnnnnnnnnnnnnnnnnnnnnnnnnnnnnnnnnnnnnnnnnnnnnnnnnnnnnnnnnnnnnnnnnnnnnnnnnnnnnnnnnnnnnnnnnnnnnnnnnnnnnnnnnnnnnnnnnnnnnnnnnnnnnnnnnnnnnnnnnnnnnnnnnnnnnnnnnnnnnnnnnnnnnnnnnnnnnnnnnnnnnnnnnnnnnnnnnnnnnnnnnnnnnnnnnnnnnnnnnnnnnnnnnnnnnnnnnnnnnnnnnnnnnnnnnnnnnnnnnnnnnnnnnnnnnnnnnnnnnnnnnnnnnnnnnnnnnnnnnnnnnnnnnnnnnnnnnnnnnnnnnnnnnnnnnnnnnnnnnnnnnnnnnnnnnnnnnnnnnnnnnnnnnnnnnnnnnnnnnnnnnnnnnnnnnnnnnnnnnnnnnnnnnnnnnnnnnnnnnnnnnnnnnnnnnnnnnnnnnnnnnnnnnnnnnnnnnnnnnnnnnnnnnnnnnnnnnnnnnnnnnnnnnnnnnnnnnnnnnnnnnnnnnnnnnnnnnnnnnnnnnnnnnnnnnnnnnnnnnnnnnnnnnnnnnnnnnnnnnnnnnnnnnnnnnnnnnnnnnnnnnnnnnnnnnnnnnnnnnnnnnnnnnnnnnnnnnnnnnnnnnnnnnnnnnnnnnnnnnnnnnnnnnnnnnnnnnnnnnnnnnnnnnnnnnnnnnnnnnnnnnnnnnnnnnnnnnnnnnnnnnnnnnnnnnnnnnnnnnnnnnnnnnnnnnnnnnnnnnnnnnnnnnnnnnnnnnnnnnnnnnnnnnnnnnnnnnnnnnnnnnnnnnnnnnnnnnnnnnnnnnnnnnnnnnnnnnnnnnnnnnnnnnnnnnnnnnnnnnnnnnnnnnnnnnnnnnnnnnnnnnnnnnnnnnnnnnnnnnnnnnnnnnnnnnnnnnnnnnnnnnnnnnnnnnnnnnnnnnnnnnnnnnnnnnnnnnnnnnnnnnnnnnnnnnnnnnnnnnnnnnnnnnnnnnnnnnnnnnnnnnnnnnnnnnnnnnnnnnnnnnnnnnnnnnnnnnnnnnnnnnnnnnnnnnnnnnnnnnnnnnnnnnnnnnnnnnnnnnnnnnnnnnnnnnnnnnnnnnnnnnnnnnnnnnnnnnnnnnnnnnnnnnnnnnnnnnnnnnnnnnnnnnnnnnnnnnnnnnnnnnnnnnnnnnnnnnnnnnnnnnnnnnnnnnnnnnnnnnnnnnnnnnnnnnnnnnnnnnnnnnnnnnnnnnnnnnnnnnnnnnnnnnnnnnnnnnnnnnnnnnnnnnnnnnnnnnnnnnnnnnnnnnnnnnnnnnnnnnnnnnnnnnnnnnnnnnnnnnnnnnnnnnnnnnnnnnnnnnnnnnnnnnnnnnnnnnnnnnnnnnnnnnnnnnnnnnnnnnnnnnnnnnnnnnnnnnnnnnnnnnnnnnnnnnnnnnnnnnnnnnnnnnnnnnnnnnnnnnnnnnnnnnnnnnnnnnnnnnnnnnnnnnnnnnnnnnnnnnnnnnnnnnnnnnnnnnnnnnnnnnnnnnnnnnnnnnnnnnnnnnnnnnnnnnnnnnnnnnnnnnnnnnnnnnnnnnnnnnnnnnnnnnnnnnnnnnnnnnnnnnnnnnnnnnnnnnnnnnnnnnnnnnnnnnnnnnnnnnnnnnnnnnnnnnnnnnnnnnnnnnnnnnnnnnnnnnnnnnnnnnnnnnnnnnnnnnnnnnnnnnnnnnnnnnnnnnnnnnnnnnnnnnnnnnnnnnnnnnnnnnnnnnnnnnnnnnnnnnnnnnnnnnnnnnnnnnnnnnnnnnnnnnnnnnnnnnnnnnnnnnnnnnnnnnnnnnnnnnnnnnnnnnnnnnnnnnnnnnnnnnnnnnnnnnnnnnnnnnnnnnnnnnnnnnnnnnnnnnnnnnnnnnnnnnnnnnnnnnnnnnnnnnnnnnnnnnnnnnnnnnnnnnnnnnnnnnnnnnnnnnnnnnnnnnnnnnnnnnnnnnnnnnnnnnnnnnnnnnnnnnnnnnnnnnnnnnnnnnnnnnnnnnnnnnnnnnnnnnnnnnnnnnnnnnnnnnnnnnnnnnnnnnnnnnnnnnnnnnnnnnnnnnnnnnnnnnnnnnnnnnnnnnnnnnnnnnnnnnnnnnnnnnnnnnnnnnnnnnnnnnnnnnnnnnnnnnnnnnnnnnnnnnnnnnnnnnnnnnnnnnnnnnnnnnnnnnnnnnnnnnnnnnnnnnnnnnnnnnnnnnnnnnnnnnnnnnnnnnnnnnnnnnnnnnnnnnnnnnnnnnnnnnnnnnnnnnnnnnnnnnnnnnnnnnnnnnnnnnnnnnnnnnnnnnnnnnnnnnnnnnnnnnnnnnnnnnnnnnnnnnnnnnnnnnnnnnnnnnnnnnnnnnnnnnnnnnnnnnnnnnnnnnnnnnnnnnnnnnnnnnnnnnnnnnnnnnnnnnnnnnnnnnnnnnnnnnnnnnnnnnnnnnnnnnnnnnnnnnnnnnnnnnnnnnnnnnnnnnnnnnnnnnnnnnnnnnnnnnnnnnnnnnnnnnnnnnnnnnnnnnnnnnnnnnnnnnnnnnnnnnnnnnnnnnnnnnnnnnnnnnnnnnnnnnnnnnnnnnnnnnnnnnnnnnnnnnnnnnnnnnnnnnnnnnnnnnnnnnnnnnnnnnnnnnnnnnnnnnnnnnnnnnnnnnnnnnnnnnnnnnnnnnnnnnnnnnnnnnnnnnnnnnnnnnnnnnnnnnnnnnnnnnnnnnnnnnnnnnnnnnnnnnnnnnnnnnnnnnnnnnnnnnnnnnnnnnnnnnnnnnnnnnnnnnnnnnnnnnnnnnnnnnnnnnnnnnnnnnnnnnnnnnnnnnnnnnnnnnnnnnnnnnnnnnnnnnnnnnnnnnnnnnnnnnnnnnnnnnnnnnnnnnnnnnnnnnnnnnnnnnnnnnnnnnnnnnnnnnnnnnnnnnnnnnnnnnnnnnnnnnnnnnnnnnnnnnnnnnnnnnnnnnnnnnnnnnnnnnnnnnnnnnnnnnnnnnnnnnnnnnnnnnnnnnnnnnnnnnnnnnnnnnnnnnnnnnnnnnnnnnnnnnnnnnnnnnnnnnnnnnnnnnnnnnnnnnnnnnnnnnnnnnnnnnnnnnnnnnnnnnnnnnnnnnnnnnnnnnnnnnnnnnnnnnnnnnnnnnnnnnnnnnnnnnnnnnnnnnnnnnnnnnnnnnnnnnnnnnnnnnnnnnnnnnnnnnnnnnnnnnnnnnnnnnnnnnnnnnnnnnnnnnnnnnnnnnnnnnnnnnnnnnnnnnnnnnnnnnnnnnnnnnnnnnnnnnnnnnnnnnnnnnnnnnnnnnnnnnnnnnnnnnnnnnnnnnnnnnnnnnnnnnnnnnnnnnnnnnnnnnnnnnnnnnnnnnnnnnnnnnnnnnnnnnnnnnnnnnnnnnnnnnnnnnnnnnnnnnnnnnnnnnnnnnnnnnnnnnnnnnnnnnnnnnnnnnnnnnnnnnnnnnnnnnnnnnnnnnnnnnnnnnnnnnnnnnnnnnnnnnnnnnnnnnnnnnnnnnnnnnnnnnnnnnnnnnnnnnnnnnnnnnnnnnnnnnnnnnnnnnnnnnnnnnnnnnnnnnnnnnnnnnnnnnnnnnnnnnnnnnnnnnnnnnnnnnnnnnnnnnnnnnnnnnnnnnnnnnnnnnnnnnnnnnnnnnnnnnnnnnnnnnnnnnnnnnnnnnnnnnnnnnnnnnnnnnnnnnnnnnnnnnnnnnnnnnnnnnnnnnnnnnnnnnnnnnnnnnnnnnnnnnnnnnnnnnnnnnnnnnnnnnnnnnnnnnnnnnnnnnnnnnnnnnnnnnnnnnnnnnnnnnnnnnnnnnnnnnnnnnnnnnnnnnnnnnnnnnnnnnnnnnnnnnnnnnnnnnnnnnnnnnnnnnnnnnnnnnnnnnnnnnnnnnnnnnnnnnnnnnnnnnnnnnnnnnnnnnnnnnnnnnnnnnnnnnnnnnnnnnnnnnnnnnnnnnnnnnnnnnnnnnnnnnnnnnnnnnnnnnnnnnnnnnnnnnnnnnnnnnnnnnnnnnnnnnnnnnnnnnnnnnnnnnnnnnnnnnnnnnnnnnnnnnnnnnnnnnnnnnnnnnnnnnnnnnnnnnnnnnnnnnnnnnnnnnnnnnnnnnnnnnnnnnnnnnnnnnnnnnnnnnnnnnnnnnnnnnnnnnnnnnnnnnnnnnnnnnnnnnnnnnnnnnnnnnnnnnnnnnnnnnnnnnnnnnnnnnnnnnnnnnnnnnnnnnnnnnnnnnnnnnnnnnnnnnnnnnnnnnnnnnnnnnnnnnnnnnnnnnnnnnnnnnnnnnnnnnnnnnnnnnnnnnnnnnnnnnnnnnnnnnnnnnnnnnnnnnnnnnnnnnnnnnnnnnnnnnnnnnnnnnnnnnnnnnnnnnnnnnnnnnnnnnnnnnnnnnnnnnnnnnnnnnnnnnnnnnnnnnnnnnnnnnnnnnnnnnnnnnnnnnnnnnnnnnnnnnnnnnnnnnnnnnnnnnnnnnnnnnnnnnnnnnnnnnnnnnnnnnnnnnnnnnnnnnnnnnnnnnnnnnnnnnnnnnnnnnnnnnnnnnnnnnnnnnnnnnnnnnnnnnnnnnnnnnnnnnnnnnnnnnnnnnnnnnnnnnnnnnnnnnnnnnnnnnnnnnnnnnnnnnnnnnnnnnnnnnnnnnnnnnnnnnnnnnnnnnnnnnnnnnnnnnnnnnnnnnnnnnnnnnnnnnnnnnnnnnnnnnnnnnnnnnnnnnnnnnnnnnnnnnnnnnnnnnnnnnnnnnnnnnnnnnnnnnnnnnnnnnnnnnnnnnnnnnnnnnnnnnnnnnnnnnnnnnnnnnnnnnnnnnnnnnnnnnnnnnnnnnnnnnnnnnnnnnnnnnnnnnnnnnnnnnnnnnnnnnnnnnnnnnnnnnnnnnnnnnnnnnnnnnnnnnnnnnnnnnnnnnnnnnnnnnnnnnnnnnnnnnnnnnnnnnnnnnnnnnnnnnnnnnnnnnnnnnnnnnnnnnnnnnnnnnnnnnnnnnnnnnnnnnnnnnnnnnnnnnnnnnnnnnnnnnnnnnnnnnnnnnnnnnnnnnnnnnnnnnnnnnnnnnnnnnnnnnnnnnnnnnnnnnnnnnnnnnnnnnnnnnnnnnnnnnnnnnnnnnnnnnnnnnnnnnnnnnnnnnnnnnnnnnnnnnnnnnnnnnnnnnnnnnnnnnnnnnnnnnnnnnnnnnnnnnnnnnnnnnnnnnnnnnnnnnnnnnnnnnnnnnnnnnnnnnnnnnnnnnnnnnnnnnnnnnnnnnnnnnnnnnnnnnnnnnnnnnnnnnnnnnnnnnnnnnnnnnnnnnnnnnnnnnnnnnnnnnnnnnnnnnnnnnnnnnnnnnnnnnnnnnnnnnnnnnnnnnnnnnnnnnnnnnnnnnnnnnnnnnnnnnnnnnnnnnnnnnnnnnnnnnnnnnnnnnnnnnnnnnnnnnnnnnnnnnnnnnnnnnnnnnnnnnnnnnnnnnnnnnnnnnnnnnnnnnnnnnnnnnnnnnnnnnnnnnnnnnnnnnnnnnnnnnnnnnnnnnnnnnnnnnnnnnnnnnnnnnnnnnnnnnnnnnnnnnnnnnnnnnnnnnnnnnnnnnnnnnnnnnnnnnnnnnnnnnnnnnnnnnnnnnnnnnnnnnnnnnnnnnnnnnnnnnnnnnnnnnnnnnnnnnnnnnnnnnnnnnnnnnnnnnnnnnnnnnnnnnnnnnnnnnnnnnnnnnnnnnnnnnnnnnnnnnnnnnnnnnnnnnnnnnnnnnnnnnnnnnnnnnnnnnnnnnnnnnnnnnnnnnnnnnnnnnnnnnnnnnnnnnnnnnnnnnnnnnnnnnnnnnnnnnnnnnnnnnnnnnnnnnnnnnnnnnnnnnnnnnnnnnnnnnnnnnnnnnnnnnnnnnnnnnnnnnnnnnnnnnnnnnnnnnnnnnnnnnnnnnnnnnnnnnnnnnnnnnnnnnnnnnnnnnnnnnnnnnnnnnnnnnnnnnnnnnnnnnnnnnnnnnnnnnnnnnnnnnnnnnnnnnnnnnnnnnnnnnnnnnnnnnnnnnnnnnnnnnnnnnnnnnnnnnnnnnnnnnnnnnnnnnnnnnnnnnnnnnnnnnnnnnnnnnnnnnnnnnnnnnnnnnnnnnnnnnnnnnnnnnnnnnnnnnnnnnnnnnnnnnnnnnnnnnnnnnnnnnnnnnnnnnnnnnnnnnnnnnnnnnnnnnnnnnnnnnnnnnnnnnnnnnnnnnnnnnnnnnnnnnnnnnnnnnnnnnnnnnnnnnnnnnnnnnnnnnnnnnnnnnnnnnnnnnnnnnnnnnnnnnnnnnnnnnnnnnnnnnnnnnnnnnnnnnnnnnnnnnnnnnnnnnnnnnnnnnnnnnnnnnnnnnnnnnnnnnnnnnnnnnnnnnnnnnnnnnnnnnnnnnnnnnnnnnnnnnnnnnnnnnnnnnnnnnnnnnnnnnnnnnnnnnnnnnnnnnnnnnnnnnnnnnnnnnnnnnnnnnnnnnnnnnnnnnnnnnnnnnnnnnnnnnnnnnnnnnnnnnnnnnnnnnnnnnnnnnnnnnnnnnnnnnnnnnnnnnnnnnnnnnnnnnnnnnnnnnnnnnnnnnnnnnnnnnnnnnnnnnnnnnnnnnnnnnnnnnnnnnnnnnnnnnnnnnnnnnnnnnnnnnnnnnnnnnnnnnnnnnnnnnnnnnnnnnnnnnnnnnnnnnnnnnnnnnnnnnnnnnnnnnnnnnnnnnnnnnnnnnnnnnnnnnnnnnnnnnnnnnnnnnnnnnnnnnnnnnnnnnnnnnnnnnnnnnnnnnnnnnnnnnnnnnnnnnnnnnnnnnnnnnnnnnnnnnnnnnnnnnnnnnnnnnnnnnnnnnnnnnnnnnnnnnnnnnnnnnnnnnnnnnnnnnnnnnnnnnnnnnnnnnnnnnnnnnnnnnnnnnnnnnnnnnnnnnnnnnnnnnnnnnnnnnnnnnnnnnnnnnnnnnnnnnnnnnnnnnnnnnnnnnnnnnnnnnnnnnnnnnnnnnnnnnnnnnnnnnnnnnnnnnnnnnnnnnnnnnnnnnnnnnnnnnnnnnnnnnnnnnnnnnnnnnnnnnnnnnnnnnnnnnnnnnnnnnnnnnnnnnnnnnnnnnnnnnnnnnnnnnnnnnnnnnnnnnnnnnnnnnnnnnnnnnnnnnnnnnnnnnnnnnnnnnnnnnnnnnnnnnnnnnnnnnnnnnnnnnnnnnnnnnnnnnnnnnnnnnnnnnnnnnnnnnnnnnnnnnnnnnnnnnnnnnnnnnnnnnnnnnnnnnnnnnnnnnnnnnnnnnnnnnnnnnnnnnnnnnnnnnnnnnnnnnnnnnnnnnnnnnnnnnnnnnnnnnnnnnnnnnnnnnnnnnnnnnnnnnnnnnnnnnnnnnnnnnnnnnnnnnnnnnnnnnnnnnnnnnnnnnnnnnnnnnnnnnnnnnnnnnnnnnnnnnnnnnnnnnnnnnnnnnnnnnnnnnnnnnnnnnnnnnnnnnnnnnnnnnnnnnnnnnnnnnnnnnnnnnnnnnnnnnnnnnnnnnnnnnnnnnnnnnnnnnnnnnnnnnnnnnnnnnnnnnnnnnnnnnnnnnnnnnnnnnnnnnnnnnnnnnnnnnnnnnnnnnnnnnnnnnnnnnnnnnnnnnnnnnnnnnnnnnnnnnnnnnnnnnnnnnnnnnnnnnnnnnnnnnnnnnnnnnnnnnnnnnnnnnnnnnnnnnnnnnnnnnnnnnnnnnnnnnnnnnnnnnnnnnnnnnnnnnnnnnnnnnnnnnnnnnnnnnnnnnnnnnnnnnnnnnnnnnnnnnnnnnnnnnnnnnnnnnnnnnnnnnnnnnnnnnnnnnnnnnnnnnnnnnnnnnnnnnnnnnnnnnnnnnnnnnnnnnnnnnnnnnnnnnnnnnnnnnnnnnnnnnnnnnnnnnnnnnnnnnnnnnnnnnnnnnnnnnnnnnnnnnnnnnnnnnnnnnnnnnnnnnnnnnnnnnnnnnnnnnnnnnnnnnnnnnnnnnnnnnnnnnnnnnnnnnnnnnnnnnnnnnnnnnnnnnnnnnnnnnnnnnnnnnnnnnnnnnnnnnnnnnnnnnnnnnnnnnnnnnnnnnnnnnnnnnnnnnnnnnnnnnnnnnnnnnnnnnnnnnnnnnnnnnnnnnnnnnnnnnnnnnnnnnnnnnnnnnnnnnnnnnnnnnnnnnnnnnnnnnnnnnnnnnnnnnnnnnnnnnnnnnnnnnnnnnnnnnnnnnnnnnnnnnnnnnnnnnnnnnnnnnnnnnnnnnnnnnnnnnnnnnnnnnnnnnnnnnnnnnnnnnnnnnnnnnnnnnnnnnnnnnnnnnnnnnnnnnnnnnnnnnnnnnnnnnnnnnnnnnnnnnnnnnnnnnnnnnnnnnnnnnnnnnnnnnnnnnnnnnnnnnnnnnnnnnnnnnnnnnnnnnnnnnnnnnnnnnnnnnnnnnnnnnnnnnnnnnnnnnnnnnnnnnnnnnnnnnnnnnnnnnnnnnnnnnnnnnnnnnnnnnnnnnnnnnnnnnnnnnnnnnnnnnnnnnnnnnnnnnnnnnnnnnnnnnnnnnnnnnnnnnnnnnnnnnnnnnnnnnnnnnnnnnnnnnnnnnnnnnnnnnnnnnnnnnnnnnnnnnnnnnnnnnnnnnnnnnnnnnnnnnnnnnnnnnnnnnnnnnnnnnnnnnnnnnnnnnnnnnnnnnnnnnnnnnnnnnnnnnnnnnnnnnnnnnnnnnnnnnnnnnnnnnnnnnnnnnnnnnnnnnnnnnnnnnnnnnnnnnnnnnnnnnnnnnnnnnnnnnnnnnnnnnnnnnnnnnnnnnnnnnnnnnnnnnnnnnnnnnnnnnnnnnnnnnnnnnnnnnnnnnnnnnnnnnnnnnnnnnnnnnnnnnnnnnnnnnnnnnnnnnnnnnnnnnnnnnnnnnnnnnnnnnnnnnnnnnnnnnnnnnnnnnnnnnnnnnnnnnnnnnnnnnnnnnnnnnnnnnnnnnnnnnnnnnnnnnnnnnnnnnnnnnnnnnnnnnnnnnnnnnnnnnnnnnnnnnnnnnnnnnnnnnnnnnnnnnnnnnnnnnnnnnnnnnnnnnnnnnnnnnnnnnnnnnnnnnnnnnnnnnnnnnnnnnnnnnnnnnnnnnnnnnnnnnnnnnnnnnnnnnnnnnnnnnnnnnnnnnnnnnnnnnnnnnnnnnnnnnnnnnnnnnnnnnnnnnnnnnnnnnnnnnnnnnnnnnnnnnnnnnnnnnnnnnnnnnnnnnnnnnnnnnnnnnnnnnnnnnnnnnnnnnnnnnnnnnnnnnnnnnnnnnnnnnnnnnnnnnnnnnnnnnnnnnnnnnnnnnnnnnnnnnnnnnnnnnnnnnnnnnnnnnnnnnnnnnnnnnnnnnnnnnnnnnnnnnnnnnnnnnnnnnnnnnnnnnnnnnnnnnnnnnnnnnnnnnnnnnnnnnnnnnnnnnnnnnnnnnnnnnnnnnnnnnnnnnnnnnnnnnnnnnnnnnnnnnnnnnnnnnnnnnnnnnnnnnnnnnnnnnnnnnnnnnnnnnnnnnnnnnnnnnnnnnnnnnnnnnnnnnnnnnnnnnnnnnnnnnnnnnnnnnnnnnnnnnnnnnnnnnnnnnnnnnnnnnnnnnnnnnnnnnnnnnnnnnnnnnnnnnnnnnnnnnnnnnnnnnnnnnnnnnnnnnnnnnnnnnnnnnnnnnnnnnnnnnnnnnnnnnnnnnnnnnnnnnnnnnnnnnnnnnnnnnnnnnnnnnnnnnnnnnnnnnnnnnnnnnnnnnnnnnnnnnnnnnnnnnnnnnnnnnnnnnnnnnnnnnnnnnnnnnnnnnnnnnnnnnnnnnnnnnnnnnnnnnnnnnnnnnnnnnnnnnnnnnnnnnnnnnnnnnnnnnnnnnnnnnnnnnnnnnnnnnnnnnnnnnnnnnnnnnnnnnnnnnnnnnnnnnnnnnnnnnnnnnnnnnnnnnnnnnnnnnnnnnnnnnnnnnnnnnnnnnnnnnnnnnnnnnnnnnnnnnnnnnnnnnnnnnnnnnnnnnnnnnnnnnnnnnnnnnnnnnnnnnnnnnnnnnnnnnnnnnnnnnnnnnnnnnnnnnnnnnnnnnnnnnnnnnnnnnnnnnnnnnnnnnnnnnnnnnnnnnnnnnnnnnnnnnnnnnnnnnnnnnnnnnnnnnnnnnnnnnnnnnnnnnnnnnnnnnnnnnnnnnnnnnnnnnnnnnnnnnnnnnnnnnnnnnnnnnnnnnnnnnnnnnnnnnnnnnnnnnnnnnnnnnnnnnnnnnnnnnnnnnnnnnnnnnnnnnnnnnnnnnnnnnnnnnnnnnnnnnnnnnnnnnnnnnnnnnnnnnnnnnnnnnnnnnnnnnnnnnnnnnnnnnnnnnnnnnnnnnnnnnnnnnnnnnnnnnnnnnnnnnnnnnnnnnnnnnnnnnnnnnnnnnnnnnnnnnnnnnnnnnnnnnnnnnnnnnnnnnnnnnnnnnnnnnnnnnnnnnnnnnnnnnnnnnnnnnnnnnnnnnnnnnnnnnnnnnnnnnnnnnnnnnnnnnnnnnnnnnnnnnnnnnnnnnnnnnnnnnnnnnnnnnnnnnnnnnnnnnnnnnnnnnnnnnnnnnnnnnnnnnnnnnnnnnnnnnnnnnnnnnnnnnnnnnnnnnnnnnnnnnnnnnnnnnnnnnnnnnnnnnnnnnnnnnnnnnnnnnnnnnnnnnnnnnnnnnnnnnnnnnnnnnnnnnnnnnnnnnnnnnnnnnnnnnnnnnnnnnnnnnnnnnnnnnnnnnnnnnnnnnnnnnnnnnnnnnnnnnnnnnnnnnnnnnnnnnnnnnnnnnnnnnnnnnnnnnnnnnnnnnnnnnnnnnnnnnnnnnnnnnnnnnnnnnnnnnnnnnnnnnnnnnnnnnnnnnnnnnnnnnnnnnnnnnnnnnnnnnnnnnnnnnnnnnnnnnnnnnnnnnnnnnnnnnnnnnnnnnnnnnnnnnnnnnnnnnnnnnnnnnnnnnnnnnnnnnnnnnnnnnnnnnnnnnnnnnnnnnnnnnnnnnnnnnnnnnnnnnnnnnnnnnnnnnnnnnnnnnnnnnnnnnnnnnnnnnnnnnnnnnnnnnnnnnnnnnnnnnnnnnnnnnnnnnnnnnnnnnnnnnnnnnnnnnnnnnnnnnnnnnnnnnnnnnnnnnnnnnnnnnnnnnnnnnnnnnnnnnnnnnnnnnnnnnnnnnnnnnnnnnnnnnnnnnnnnnnnnnnnnnnnnnnnnnnnnnnnnnnnnnnnnnnnnnnnnnnnnnnnnnnnnnnnnnnnnnnnnnnnnnnnnnnnnnnnnnnnnnnnnnnnnnnnnnnnnnnnnnnnnnnnnnnnnnnnnnnnnnnnnnnnnnnnnnnnnnnnnnnnnnnnnnnnnnnnnnnnnnnnnnnnnnnnnnnnnnnnnnnnnnnnnnnnnnnnnnnnnnnnnnnnnnnnnnnnnnnnnnnnnnnnnnnnnnnnnnnnnnnnnnnnnnnnnnnnnnnnnnnnnnnnnnnnnnnnnnnnnnnnnnnnnnnnnnnnnnnnnnnnnnnnnnnnnnnnnnnnnnnnnnnnnnnnnnnnnnnnnnnnnnnnnnnnnnnnnnnnnnnnnnnnnnnnnnnnnnnnnnnnnnnnnnnnnnnnnnnnnnnnnnnnnnnnnnnnnnnnnnnnnnnnnnnnnnnnnnnnnnnnnnnnnnnnnnnnnnnnnnnnnnnnnnnnnnnnnnnnnnnnnnnnnnnnnnnnnnnnnnnnnnnnnnnnnnnnnnnnnnnnnnnnnnnnnnnnnnnnnnnnnnnnnnnnnnnnnnnnnnnnnnnnnnnnnnnnnnnnnnnnnnnnnnnnnnnnnnnnnnnnnnnnnnnnnnnnnnnnnnnnnnnnnnnnnnnnnnnnnnnnnnnnnnnnnnnnnnnnnnnnnnnnnnnnnnnnnnnnnnnnnnnnnnnnnnnnnnnnnnnnnnnnnnnnnnnnnnnnnnnnnnnnnnnnnnnnnnnnnnnnnnnnnnnnnnnnnnnnnnnnnnnnnnnnnnnnnnnnnnnnnnnnnnnnnnnnnnnnnnnnnnnnnnnnnnnnnnnnnnnnnnnnnnnnnnnnnnnnnnnnnnnnnnnnnnnnnnnnnnnnnnnnnnnnnnnnnnnnnnnnnnnnnnnnnnnnnnnnnnnnnnnnnnnnnnnnnnnnnnnnnnnnnnnnnnnnnnnnnnnnnnnnnnnnnnnnnnnnnnnnnnnnnnnnnnnnnnnnnnnnnnnnnnnnnnnnnnnnnnnnnnnnnnnnnnnnnnnnnnnnnnnnnnnnnnnnnnnnnnnnnnnnnnnnnnnnnnnnnnnnnnnnnnnnnnnnnnnnnnnnnnnnnnnnnnnnnnnnnnnnnnnnnnnnnnnnnnnnnnnnnnnnnnnnnnnnnnnnnnnnnnnnnnnnnnnnnnnnnnnnnnnnnnnnnnnnnnnnnnnnnnnnnnnnnnnnnnnnnnnnnnnnnnnnnnnnnnnnnnnnnnnnnnnnnnnnnnnnnnnnnnnnnnnnnnnnnnnnnnnnnnnnnnnnnnnnnnnnnnnnnnnnnnnnnnnnnnnnnnnnnnnnnnnnnnnnnnnnnnnnnnnnnnnnnnnnnnnnnnnnnnnnnnnnnnnnnnnnnnnnnnnnnnnnnnnnnnnnnnnnnnnnnnnnnnnnnnnnnnnnnnnnnnnnnnnnnnnnnnnnnnnnnnnnnnnnnnnnnnnnnnnnnnnnnnnnnnnnnnnnnnnnnnnnnnnnnnnnnnnnnnnnnnnnnnnnnnnnnnnnnnnnnnnnnnnnnnnnnnnnnnnnnnnnnnnnnnnnnnnnnnnnnnnnnnnnnnnnnnnnnnnnnnnnnnnnnnnnnnnnnnnnnnnnnnnnnnnnnnnnnnnnnnnnnnnnnnnnnnnnnnnnnnnnnnnnnnnnnnnnnnnnnnnnnnnnnnnnnnnnnnnnnnnnnnnnnnnnnnnnnnnnnnnnnnnnnnnnnnnnnnnnnnnnnnnnnnnnnnnnnnnnnnnnnnnnnnnnnnnnnnnnnnnnnnnnnnnnnnnnnnnnnnnnnnnnnnnnnnnnnnnnnnnnnnnnnnnnnnnnnnnnnnnnnnnnnnnnnnnnnnnnnnnnnnnnnnnnnnnnnnnnnnnnnnnnnnnnnnnnnnnnnnnnnnnnnnnnnnnnnnnnnnnnnnnnnnnnnnnnnnnnnnnnnnnnnnnnnnnnnnnnnnnnnnnnnnnnnnnnnnnnnnnnnnnnnnnnnnnnnnnnnnnnnnnnnnnnnnnnnnnnnnnnnnnnnnnnnnnnnnnnnnnnnnnnnnnnnnnnnnnnnnnnnnnnnnnnnnnnnnnnnnnnnnnnnnnnnnnnnnnnnnnnnnnnnnnnnnnnnnnnnnnnnnnnnnnnnnnnnnnnnnnnnnnnnnnnnnnnnnnnnnnnnnnnnnnnnnnnnnnnnnnnnnnnnnnnnnnnnnnnnnnnnnnnnnnnnnnnnnnnnnnnnnnnnnnnnnnnnnnnnnnnnnnnnnnnnnnnnnnnnnnnnnnnnnnnnnnnnnnnnnnnnnnnnnnnnnnnnnnnnnnnnnnnnnnnnnnnnnnnnnnnnnnnnnnnnnnnnnnnnnnnnnnnnnnnnnnnnnnnnnnnnnnnnnnnnnnnnnnnnnnnnnnnnnnnnnnnnnnnnnnnnnnnnnnnnnnnnnnnnnnnnnnnnnnnnnnnnnnnnnnnnnnnnnnnnnnnnnnnnnnnnnnnnnnnnnnnnnnnnnnnnnnnnnnnnnnnnnnnnnnnnnnnnnnnnnnnnnnnnnnnnnnnnnnnnnnnnnnnnnnnnnnnnnnnnnnnnnnnnnnnnnnnnnnnnnnnnnnnnnnnnnnnnnnnnnnnnnnnnnnnnnnnnnnnnnnnnnnnnnnnnnnnnnnnnnnnnnnnnnnnnnnnnnnnnnnnnnnnnnnnnnnnnnnnnnnnnnnnnnnnnnnnnnnnnnnnnnnnnnnnnnnnnnnnnnnnnnnnnnnnnnnnnnnnnnnnnnnnnnnnnnnnnnnnnnnnnnnnnnnnnnnnnnnnnnnnnnnnnnnnnnnnnnnnnnnnnnnnnnnnnnnnnnnnnnnnnnnnnnnnnnnnnnnnnnnnnnnnnnnnnnnnnnnnnnnnnnnnnnnnnnnnnnnnnnnnnnnnnnnnnnnnnnnnnnnnnnnnnnnnnnnnnnnnnnnnnnnnnnnnnnnnnnnnnnnnnnnnnnnnnnnnnnnnnnnnnnnnnnnnnnnnnnnnnnnnnnnnnnnnnnnnnnnnnnnnnnnnnnnnnnnnnnnnnnnnnnnnnnnnnnnnnnnnnnnnnnnnnnnnnnnnnnnnnnnnnnnnnnnnnnnnnnnnnnnnnnnnnnnnnnnnnnnnnnnnnnnnnnnnnnnnnnnnnnnnnnnnnnnnnnnnnnnnnnnnnnnnnnnnnnnnnnnnnnnnnnnnnnnnnnnnnnnnnnnnnnnnnnnnnnnnnnnnnnnnnnnnnnnnnnnnnnnnnnnnnnnnnnnnnnnnnnnnnnnnnnnnnnnnnnnnnnnnnnnnnnnnnnnnnnnnnnnnnnnnnnnnnnnnnnnnnnnnnnnnnnnnnnnnnnnnnnnnnnnnnnnnnnnnnnnnnnnnnnnnnnnnnnnnnnnnnnnnnnnnnnnnnnnnnnnnnnnnnnnnnnnnnnnnnnnnnnnnnnnnnnnnnnnnnnnnnnnnnnnnnnnnnnnnnnnnnnnnnnnnnnnnnnnnnnnnnnnnnnnnnnnnnnnnnnnnnnnnnnnnnnnnnnnnnnnnnnnnnnnnnnnnnnnnnnnnnnnnnnnnnnnnnnnnnnnnnnnnnnnnnnnnnnnnnnnnnnnnnnnnnnnnnnnnnnnnnnnnnnnnnnnnnnnnnnnnnnnnnnnnnnnnnnnnnnnnnnnnnnnnnnnnnnnnnnnnnnnnnnnnnnnnnnnnnnnnnnnnnnnnnnnnnnnnnnnnnnnnnnnnnnnnnnnnnnnnnnnnnnnnnnnnnnnnnnnnnnnnnnnnnnnnnnnnnnnnnnnnnnnnnnnnnnnnnnnnnnnnnnnnnnnnnnnnnnnnnnnnnnnnnnnnnnnnnnnnnnnnnnnnnnnnnnnnnnnnnnnnnnnnnnnnnnnnnnnnnnnnnnnnnnnnnnnnnnnnnnnnnnnnnnnnnnnnnnnnnnnnnnnnnnnnnnnnnnnnnnnnnnnnnnnnnnnnnnnnnnnnnnnnnnnnnnnnnnnnnnnnnnnnnnnnnnnnnnnnnnnnnnnnnnnnnnnnnnnnnnnnnnnnnnnnnnnnnnnnnnnnnnnnnnnnnnnnnnnnnnnnnnnnnnnnnnnnnnnnnnnnnnnnnnnnnnnnnnnnnnnnnnnnnnnnnnnnnnnnnnnnnnnnnnnnnnnnnnnnnnnnnnnnnnnnnnnnnnnnnnnnnnnnnnnnnnnnnnnnnnnnnnnnnnnnnnnnnnnnnnnnnnnnnnnnnnnnnnnnnnnnnnnnnnnnnnnnnnnnnnnnnnnnnnnnnnnnnnnnnnnnnnnnnnnnnnnnnnnnnnnnnnnnnnnnnnnnnnnnnnnnnnnnnnnnnnnnnnnnnnnnnnnnnnnnnnnnnnnnnnnnnnnnnnnnnnnnnnnnnnnnnnnnnnnnnnnnnnnnnnnnnnnnnnnnnnnnnnnnnnnnnnnnnnnnnnnnnnnnnnnnnnnnnnnnnnnnnnnnnnnnnnnnnnnnnnnnnnnnnnnnnnnnnnnnnnnnnnnnnnnnnnnnnnnnnnnnnnnnnnnnnnnnnnnnnnnnnnnnnnnnnnnnnnnnnnnnnnnnnnnnnnnnnnnnnnnnnnnnnnnnnnnnnnnnnnnnnnnnnnnnnnnnnnnnnnnnnnnnnnnnnnnnnnnnnnnnnnnnnnnnnnnnnnnnnnnnnnnnnnnnnnnnnnnnnnnnnnnnnnnnnnnnnnnnnnnnnnnnnnnnnnnnnnnnnnnnnnnnnnnnnnnnnnnnnnnnnnnnnnnnnnnnnnnnnnnnnnnnnnnnnnnnnnnnnnnnnnnnnnnnnnnnnnnnnnnnnnnnnnnnnnnnnnnnnnnnnnnnnnnnnnnnnnnnnnnnnnnnnnnnnnnnnnnnnnnnnnnnnnnnnnnnnnnnnnnnnnnnnnnnnnnnnnnnnnnnnnnnnnnnnnnnnnnnnnnnnnnnnnnnnnnnnnnnnnnnnnnnnnnnnnnnnnnnnnnnnnnnnnnnnnnnnnnnnnnnnnnnnnnnnnnnnnnnnnnnnnnnnnnnnnnnnnnnnnnnnnnnnnnnnnnnnnnnnnnnnnnnnnnnnnnnnnnnnnnnnnnnnnnnnnnnnnnnnnnnnnnnnnnnnnnnnnnnnnnnnnnnnnnnnnnnnnnnnnnnnnnnnnnnnnnnnnnnnnnnnnnnnnnnnnnnnnnnnnnnnnnnnnnnnnnnnnnnnnnnnnnnnnnnnnnnnnnnnnnnnnnnnnnnnnnnnnnnnnnnnnnnnnnnnnnnnnnnnnnnnnnnnnnnnnnnnnnnnnnnnnnnnnnnnnnnnnnnnnnnnnnnnnnnnnnnnnnnnnnnnnnnnnnnnnnnnnnnnnnnnnnnnnnnnnnnnnnnnnnnnnnnnnnnnnnnnnnnnnnnnnnnnnnnnnnnnnnnnnnnnnnnnnnnnnnnnnnnnnnnnnnnnnnnnnnnnnnnnnnnnnnnnnnnnnnnnnnnnnnnnnnnnnnnnnnnnnnnnnnnnnnnnnnnnnnnnnnnnnnnnnnnnnnnnnnnnnnnnnnnnnnnnnnnnnnnnnnnnnnnnnnnnnnnnnnnnnnnnnnnnnnnnnnnnnnnnnnnnnnnnnnnnnnnnnnnnnnnnnnnnnnnnnnnnnnnnnnnnnnnnnnnnnnnnnnnnnnnnnnnnnnnnnnnnnnnnnnnnnnnnnnnnnnnnnnnnnnnnnnnnnnnnnnnnnnnnnnnnnnnnnnnnnnnnnnnnnnnnnnnnnnnnnnnnnnnnnnnnnnnnnnnnnnnnnnnnnnnnnnnnnnnnnnnnnnnnnnnnnnnnnnnnnnnnnnnnnnnnnnnnnnnnnnnnnnnnnnnnnnnnnnnnnnnnnnnnnnnnnnnnnnnnnnnnnnnnnnnnnnnnnnnnnnnnnnnnnnnnnnnnnnnnnnnnnnnnnnnnnnnnnnnnnnnnnnnnnnnnnnnnnnnnnnnnnnnnnnnnnnnnnnnnnnnnnnnnnnnnnnnnnnnnnnnnnnnnnnnnnnnnnnnnnnnnnnnnnnnnnnnnnnnnnnnnnnnnnnnnnnnnnnnnnnnnnnnnnnnnnnnnnnnnnnnnnnnnnnnnnnnnnnnnnnnnnnnnnnnnnnnnnnnnnnnnnnnnnnnnnnnnnnnnnnnnnnnnnnnnnnnnnnnnnnnnnnnnnnnnnnnnnnnnnnnnnnnnnnnnnnnnnnnnnnnnnnnnnnnnnnnnnnnnnnnnnnnnnnnnnnnnnnnnnnnnnnnnnnnnnnnnnnnnnnnnnnnnnnnnnnnnnnnnnnnnnnnnnnnnnnnnnnnnnnnnnnnnnnnnnnnnnnnnnnnnnnnnnnnnnnnnnnnnnnnnnnnnnnnnnnnnnnnnnnnnnnnnnnnnnnnnnnnnnnnnnnnnnnnnnnnnnnnnnnnnnnnnnnnnnnnnnnnnnnnnnnnnnnnnnnnnnnnnnnnnnnnnnnnnnnnnnnnnnnnnnnnnnnnnnnnnnnnnnnnnnnnnnnnnnnnnnnnnnnnnnnnnnnnnnnnnnnnnnnnnnnnnnnnnnnnnnnnnnnnnnnnnnnnnnnnnnnnnnnnnnnnnnnnnnnnnnnnnnnnnnnnnnnnnnnnnnnnnnnnnnnnnnnnnnnnnnnnnnnnnnnnnnnnnnnnnnnnnnnnnnnnnnnnnnnnnnnnnnnnnnnnnnnnnnnnnnnnnnnnnnnnnnnnnnnnnnnnnnnnnnnnnnnnnnnnnnnnnnnnnnnnnnnnnnnnnnnnnnnnnnnnnnnnnnnnnnnnnnnnnnnnnnnnnnnnnnnnnnnnnnnnnnnnnnnnnnnnnnnnnnnnnnnnnnnnnnnnnnnnnnnnnnnnnnnnnnnnnnnnnnnnnnnnnnnnnnnnnnnnnnnnnnnnnnnnnnnnnnnnnnnnnnnnnnnnnnnnnnnnnnnnnnnnnnnnnnnnnnnnnnnnnnnnnnnnnnnnnnnnnnnnnnnnnnnnnnnnnnnnnnnnnnnnnnnnnnnnnnnnnnnnnnnnnnnnnnnnnnnnnnnnnnnnnnnnnnnnnnnnnnnnnnnnnnnnnnnnnnnnnnnnnnnnnnnnnnnnnnnnnnnnnnnnnnnnnnnnnnnnnnnnnnnnnnnnnnnnnnnnnnnnnnnnnnnnnnnnnnnnnnnnnnnnnnnnnnnnnnnnnnnnnnnnnnnnnnnnnnnnnnnnnnnnnnnnnnnnnnnnnnnnnnnnnnnnnnnnnnnnnnnnnnnnnnnnnnnnnnnnnnnnnnnnnnnnnnnnnnnnnnnnnnnnnnnnnnnnnnnnnnnnnnnnnnnnnnnnnnnnnnnnnnnnnnnnnnnnnnnnnnnnnnnnnnnnnnnnnnnnnnnnnnnnnnnnnnnnnnnnnnnnnnnnnnnnnnnnnnnnnnnnnnnnnnnnnnnnnnnnnnnnnnnnnnnnnnnnnnnnnnnnnnnnnnnnnnnnnnnnnnnnnnnnnnnnnnnnnnnnnnnnnnnnnnnnnnnnnnnnnnnnnnnnnnnnnnnnnnnnnnnnnnnnnnnnnnnnnnnnnnnnnnnnnnnnnnnnnnnnnnnnnnnnnnnnnnnnnnnnnnnnnnnnnnnnnnnnnnnnnnnnnnnnnnnnnnnnnnnnnnnnnnnnnnnnnnnnnnnnnnnnnnnnnnnnnnnnnnnnnnnnnnnnnnnnnnnnnnnnnnnnnnnnnnnnnnnnnnnnnnnnnnnnnnnnnnnnnnnnnnnnnnnnnnnnnnnnnnnnnnnnnnnnnnnnnnnnnnnnnnnnnnnnnnnnnnnnnnnnnnnnnnnnnnnnnnnnnnnnnnnnnnnnnnnnnnnnnnnnnnnnnnnnnnnnnnnnnnnnnnnnnnnnnnnnnnnnnnnnnnnnnnnnnnnnnnnnnnnnnnnnnnnnnnnnnnnnnnnnnnnnnnnnnnnnnnnnnnnnnnnnnnnnnnnnnnnnnnnnnnnnnnnnnnnnnnnnnnnnnnnnnnnnnnnnnnnnnnnnnnnnnnnnnnnnnnnnnnnnnnnnnnnnnnnnnnnnnnnnnnnnnnnnnnnnnnnnnnnnnnnnnnnnnnnnnnnnnnnnnnnnnnnnnnnnnnnnnnnnnnnnnnnnnnnnnnnnnnnnnnnnnnnnnnnnnnnnnnnnnnnnnnnnnnnnnnnnnnnnnnnnnnnnnnnnnnnnnnnnnnnnnnnnnnnnnnnnnnnnnnnnnnnnnnnnnnnnnnnnnnnnnnnnnnnnnnnnnnnnnnnnnnnnnnnnnnnnnnnnnnnnnnnnnnnnnnnnnnnnnnnnnnnnnnnnnnnnnnnnnnnnnnnnnnnnnnnnnnnnnnnnnnnnnnnnnnnnnnnnnnnnnnnnnnnnnnnnnnnnnnnnnnnnnnnnnnnnnnnnnnnnnnnnnnnnnnnnnnnnnnnnnnnnnnnnnnnnnnnnnnnnnnnnnnnnnnnnnnnnnnnnnnnnnnnnnnnnnnnnnnnnnnnnnnnnnnnnnnnnnnnnnnnnnnnnnnnnnnnnnnnnnnnnnnnnnnnnnnnnnnnnnnnnnnnnnnnnnnnnnnnnnnnnnnnnnnnnnnnnnnnnnnnnnnnnnnnnnnnnnnnnnnnnnnnnnnnnnnnnnnnnnnnnnnnnnnnnnnnnnnnnnnnnnnnnnnnnnnnnnnnnnnnnnnnnnnnnnnnnnnnnnnnnnnnnnnnnnnnnnnnnnnnnnnnnnnnnnnnnnnnnnnnnnnnnnnnnnnnnnnnnnnnnnnnnnnnnnnnnnnnnnnnnnnnnnnnnnnnnnnnnnnnnnnnnnnnnnnnnnnnnnnnnnnnnnnnnnnnnnnnnnnnnnnnnnnnnnnnnnnnnnnnnnnnnnnnnnnnnnnnnnnnnnnnnnnnnnnnnnnnnnnnnnnnnnnnnnnnnnnnnnnnnnnnnnnnnnnnnnnnnnnnnnnnnnnnnnnnnnnnnnnnnnnnnnnnnnnnnnnnnnnnnnnnnnnnnnnnnnnnnnnnnnnnnnnnnnnnnnnnnnnnnnnnnnnnnnnnnnnnnnnnnnnnnnnnnnnnnnnnnnnnnnnnnnnnnnnnnnnnnnnnnnnnnnnnnnnnnnnnnnnnnnnnnnnnnnnnnnnnnnnnnnnnnnnnnnnnnnnnnnnnnnnnnnnnnnnnnnnnnnnnnnnnnnnnnnnnnnnnnnnnnnnnnnnnnnnnnnnnnnnnnnnnnnnnnnnnnnnnnnnnnnnnnnnnnnnnnnnnnnnnnnnnnnnnnnnnnnnnnnnnnnnnnnnnnnnnnnnnnnnnnnnnnnnnnnnnnnnnnnnnnnnnnnnnnnnnnnnnnnnnnnnnnnnnnnnnnnnnnnnnnnnnnnnnnnnnnnnnnnnnnnnnnnnnnnnnnnnnnnnnnnnnnnnnnnnnnnnnnnnnnnnnnnnnnnnnnnnnnnnnnnnnnnnnnnnnnnnnnnnnnnnnnnnnnnnnnnnnnnnnnnnnnnnnnnnnnnnnnnnnnnnnnnnnnnnnnnnnnnnnnnnnnnnnnnnnnnnnnnnnnnnnnnnnnnnnnnnnnnnnnnnnnnnnnnnnnnnnnnnnnnnnnnnnnnnnnnnnnnnnnnnnnnnnnnnnnnnnnnnnnnnnnnnnnnnnnnnnnnnnnnnnnnnnnnnnnnnnnnnnnnnnnnnnnnnnnnnnnnnnnnnnnnnnnnnnnnnnnnnnnnnnnnnnnnnnnnnnnnnnnnnnnnnnnnnnnnnnnnnnnnnnnnnnnnnnnnnnnnnnnnnnnnnnnnnnnnnnnnnnnnnnnnnnnnnnnnnnnnnnnnnnnnnnnnnnnnnnnnnnnnnnnnnnnnnnnnnnnnnnnnnnnnnnnnnnnnnnnnnnnnnnnnnnnnnnnnnnnnnnnnnnnnnnnnnnnnnnnnnnnnnnnnnnnnnnnnnnnnnnnnnnnnnnnnnnnnnnnnnnnnnnnnnnnnnnnnnnnnnnnnnnnnnnnnnnnnnnnnnnnnnnnnnnnnnnnnnnnnnnnnnnnnnnnnnnnnnnnnnnnnnnnnnnnnnnnnnnnnnnnnnnnnnnnnnnnnnnnnnnnnnnnnnnnnnnnnnnnnnnnnnnnnnnnnnnnnnnnnnnnnnnnnnnnnnnnnnnnnnnnnnnnnnnnnnnnnnnnnnnnnnnnnnnnnnnnnnnnnnnnnnnnnnnnnnnnnnnnnnnnnnnnnnnnnnnnnnnnnnnnnnnnnnnnnnnnnnnnnnnnnnnnnnnnnnnnnnnnnnnnnnnnnnnnnnnnnnnnnnnnnnnnnnnnnnnnnnnnnnnnnnnnnnnnnnnnnnnnnnnnnnnnnnnnnnnnnnnnnnnnnnnnnnnnnnnnnnnnnnnnnnnnnnnnnnnnnnnnnnnnnnnnnnnnnnnnnnnnnnnnnnnnnnnnnnnnnnnnnnnnnnnnnnnnnnnnnnnnnnnnnnnnnnnnnnnnnnnnnnnnnnnnnnnnnnnnnnnnnnnnnnnnnnnnnnnnnnnnnnnnnnnnnnnnnnnnnnnnnnnnnnnnnnnnnnnnnnnnnnnnnnnnnnnnnnnnnnnnnnnnnnnnnnnnnnnnnnnnnnnnnnnnnnnnnnnnnnnnnnnnnnnnnnnnnnnnnnnnnnnnnnnnnnnnnnnnnnnnnnnnnnnnnnnnnnnnnnnnnnnnnnnnnnnnnnnnnnnnnnnnnnnnnnnnnnnnnnnnnnnnnnnnnnnnnnnnnnnnnnnnnnnnnnnnnnnnnnnnnnnnnnnnnnnnnnnnnnnnnnnnnnnnnnnnnnnnnnnnnnnnnnnnnnnnnnnnnnnnnnnnnnnnnnnnnnnnnnnnnnnnnnnnnnnnnnnnnnnnnnnnnnnnnnnnnnnnnnnnnnnnnnnnnnnnnnnnnnnnnnnnnnnnnnnnnnnnnnnnnnnnnnnnnnnnnnnnnnnnnnnnnnnnnnnnnnnnnnnnnnnnnnnnnnnnnnnnnnnnnnnnnnnnnnnnnnnnnnnnnnnnnnnnnnnnnnnnnnnnnnnnnnnnnnnnnnnnnnnnnnnnnnnnnnnnnnnnnnnnnnnnnnnnnnnnnnnnnnnnnnnnnnnnnnnnnnnnnnnnnnnnnnnnnnnnnnnnnnnnnnnnnnnnnnnnnnnnnnnnnnnnnnnnnnnnnnnnnnnnnnnnnnnnnnnnnnnnnnnnnnnnnnnnnnnnnnnnnnnnnnnnnnnnnnnnnnnnnnnnnnnnnnnnnnnnnnnnnnnnnnnnnnnnnnnnnnnnnnnnnnnnnnnnnnnnnnnnnnnnnnnnnnnnnnnnnnnnnnnnnnnnnnnnnnnnnnnnnnnnnnnnnnnnnnnnnnnnnnnnnnnnnnnnnnnnnnnnnnnnnnnnnnnnnnnnnnnnnnnnnnnnnnnnnnnnnnnnnnnnnnnnnnnnnnnnnnnnnnnnnnnnnnnnnnnnnnnnnnnnnnnnnnnnnnnnnnnnnnnnnnnnnnnnnnnnnnnnnnnnnnnnnnnnnnnnnnnnnnnnnnnnnnnnnnnnnnnnnnnnnnnnnnnnnnnnnnnnnnnnnnnnnnnnnnnnnnnnnnnnnnnnnnnnnnnnnnnnnnnnnnnnnnnnnnnnnnnnnnnnnnnnnnnnnnnnnnnnnnnnnnnnnnnnnnnnnnnnnnnnnnnnnnnnnnnnnnnnnnnnnnnnnnnnnnnnnnnnnnnnnnnnnnnnnnnnnnnnnnnnnnnnnnnnnnnnnnnnnnnnnnnnnnnnnnnnnnnnnnnnnnnnnnnnnnnnnnnnnnnnnnnnnnnnnnnnnnnnnnnnnnnnnnnnnnnnnnnnnnnnnnnnnnnnnnnnnnnnnnnnnnnnnnnnnnnnnnnnnnnnnnnnnnnnnnnnnnnnnnnnnnnnnnnnnnnnnnnnnnnnnnnnnnnnnnnnnnnnnnnnnnnnnnnnnnnnnnnnnnnnnnnnnnnnnnnnnnnnnnnnnnnnnnnnnnnnnnnnnnnnnnnnnnnnnnnnnnnnnnnnnnnnnnnnnnnnnnnnnnnnnnnnnnnnnnnnnnnnnnnnnnnnnnnnnnnnnnnnnnnnnnnnnnnnnnnnnnnnnnnnnnnnnnnnnnnnnnnnnnnnnnnnnnnnnnnnnnnnnnnnnnnnnnnnnnnnnnnnnnnnnnnnnnnnnnnnnnnnnnnnnnnnnnnnnnnnnnnnnnnnnnnnnnnnnnnnnnnnnnnnnnnnnnnnnnnnnnnnnnnnnnnnnnnnnnnnnnnnnnnnnnnnnnnnnnnnnnnnnnnnnnnnnnnnnnnnnnnnnnnnnnnnnnnnnnnnnnnnnnnnnnnnnnnnnnnnnnnnnnnnnnnnnnnnnnnnnnnnnnnnnnnnnnnnnnnnnnnnnnnnnnnnnnnnnnnnnnnnnnnnnnnnnnnnnnnnnnnnnnnnnnnnnnnnnnnnnnnnnnnnnnnnnnnnnnnnnnnnnnnnnnnnnnnnnnnnnnnnnnnnnnnnnnnnnnnnnnnnnnnnnnnnnnnnnnnnnnnnnnnnnnnnnnnnnnnnnnnnnnnnnnnnnnnnnnnnnnnnnnnnnnnnnnnnnnnnnnnnnnnnnnnnnnnnnnnnnnnnnnnnnnnnnnnnnnnnnnnnnnnnnnnnnnnnnnnnnnnnnnnnnnnnnnnnnnnnnnnnnnnnnnnnnnnnnnnnnnnnnnnnnnnnnnnnnnnnnnnnnnnnnnnnnnnnnnnnnnnnnnnnnnnnnnnnnnnnnnnnnnnnnnnnnnnnnnnnnnnnnnnnnnnnnnnnnnnnnnnnnnnnnnnnnnnnnnnnnnnnnnnnnnnnnnnnnnnnnnnnnnnnnnnnnnnnnnnnnnnnnnnnnnnnnnnnnnnnnnnnnnnnnnnnnnnnnnnnnnnnnnnnnnnnnnnnnnnnnnnnnnnnnnnnnnnnnnnnnnnnnnnnnnnnnnnnnnnnnnnnnnnnnnnnnnnnnnnnnnnnnnnnnnnnnnnnnnnnnnnnnnnnnnnnnnnnnnnnnnnnnnnnnnnnnnnnnnnnnnnnnnnnnnnnnnnnnnnnnnnnnnnnnnnnnnnnnnnnnnnnnnnnnnnnnnnnnnnnnnnnnnnnnnnnnnnnnnnnnnnnnnnnnnnnnnnnnnnnnnnnnnnnnnnnnnnnnnnnnnnnnnnnnnnnnnnnnnnnnnnnnnnnnnnnnnnnnnnnnnnnnnnnnnnnnnnnnnnnnnnnnnnnnnnnnnnnnnnnnnnnnnnnnnnnnnnnnnnnnnnnnnnnnnnnnnnnnnnnnnnnnnnnnnnnnnnnnnnnnnnnnnnnnnnnnnnnnnnnnnnnnnnnnnnnnnnnnnnnnnnnnnnnnnnnnnnnnnnnnnnnnnnnnnnnnnnnnnnnnnnnnnnnnnnnnnnnnnnnnnnnnnnnnnnnnnnnnnnnnnnnnnnnnnnnnnnnnnnnnnnnnnnnnnnnnnnnnnnnnnnnnnnnnnnnnnnnnnnnnnnnnnnnnnnnnnnnnnnnnnnnnnnnnnnnnnnnnnnnnnnnnnnnnnnnnnnnnnnnnnnnnnnnnnnnnnnnnnnnnnnnnnnnnnnnnnnnnnnnnnnnnnnnnnnnnnnnnnnnnnnnnnnnnnnnnnnnnnnnnnnnnnnnnnnnnnnnnnnnnnnnnnnnnnnnnnnnnnnnnnnnnnnnnnnnnnnnnnnnnnnnnnnnnnnnnnnnnnnnnnnnnnnnnnnnnnnnnnnnnnnnnnnnnnnnnnnnnnnnnnnnnnnnnnnnnnnnnnnnnnnnnnnnnnnnnnnnnnnnnnnnnnnnnnnnnnnnnnnnnnnnnnnnnnnnnnnnnnnnnnnnnnnnnnnnnnnnnnnnnnnnnnnnnnnnnnnnnnnnnnnnnnnnnnnnnnnnnnnnnnnnnnnnnnnnnnnnnnnnnnnnnnnnnnnnnnnnnnnnnnnnnnnnnnnnnnnnnnnnnnnnnnnnnnnnnnnnnnnnnnnnnnnnnnnnnnnnnnnnnnnnnnnnnnnnnnnnnnnnnnnnnnnnnnnnnnnnnnnnnnnnnnnnnnnnnnnnnnnnnnnnnnnnnnnnnnnnnnnnnnnnnnnnnnnnnnnnnnnnnnnnnnnnnnnnnnnnnnnnnnnnnnnnnnnnnnnnnnnnnnnnnnnnnnnnnnnnnnnnnnnnnnnnnnnnnnnnnnnnnnnnnnnnnnnnnnnnnnnnnnnnnnnnnnnnnnnnnnnnnnnnnnnnnnnnnnnnnnnnnnnnnnnnnnnnnnnnnnnnnnnnnnnnnnnnnnnnnnnnnnnnnnnnnnnnnnnnnnnnnnnnnnnnnnnnnnnnnnnnnnnnnnnnnnnnnnnnnnnnnnnnnnnnnnnnnnnnnnnnnnnnnnnnnnnnnnnnnnnnnnnnnnnnnnnnnnnnnnnnnnnnnnnnnnnnnnnnnnnnnnnnnnnnnnnnnnnnnnnnnnnnnnnnnnnnnnnnnnnnnnnnnnnnnnnnnnnnnnnnnnnnnnnnnnnnnnnnnnnnnnnnnnnnnnnnnnnnnnnnnnnnnnnnnnnnnnnnnnnnnnnnnnnnnnnnnnnnnnnnnnnnnnnnnnnnnnnnnnnnnnnnnnnnnnnnnnnnnnnnnnnnnnnnnnnnnnnnnnnnnnnnnnnnnnnnnnnnnnnnnnnnnnnnnnnnnnnnnnnnnnnnnnnnnnnnnnnnnnnnnnnnnnnnnnnnnnnnnnnnnnnnnnnnnnnnnnnnnnnnnnnnnnnnnnnnnnnnnnnnnnnnnnnnnnnnnnnnnnnnnnnnnnnnnnnnnnnnnnnnnnnnnnnnnnnnnnnnnnnnnnnnnnnnnnnnnnnnnnnnnnnnnnnnnnnnnnnnnnnnnnnnnnnnnnnnnnnnnnnnnnnnnnnnnnnnnnnnnnnnnnnnnnnnnnnnnnnnnnnnnnnnnnnnnnnnnnnnnnnnnnnnnnnnnnnnnnnnnnnnnnnnnnnnnnnnnnnnnnnnnnnnnnnnnnnnnnnnnnnnnnnnnnnnnnnnnnnnnnnnnnnnnnnnnnnnnnnnnnnnnnnnnnnnnnnnnnnnnnnnnnnnnnnnnnnnnnnnnnnnnnnnnnnnnnnnnnnnnnnnnnnnnnnnnnnnnnnnnnnnnnnnnnnnnnnnnnnnnnnnnnnnnnnnnnnnnnnnnnnnnnnnnnnnnnnnnnnnnnnnnnnnnnnnnnnnnnnnnnnnnnnnnnnnnnnnnnnnnnnnnnnnnnnnnnnnnnnnnnnnnnnnnnnnnnnnnnnnnnnnnnnnnnnnnnnnnnnnnnnnnnnnnnnnnnnnnnnnnnnnnnnnnnnnnnnnnnnnnnnnnnnnnnnnnnnnnnnnnnnnnnnnnnnnnnnnnnnnnnnnnnnnnnnnnnnnnnnnnnnnnnnnnnnnnnnnnnnnnnnnnnnnnnnnnnnnnnnnnnnnnnnnnnnnnnnnnnnnnnnnnnnnnnnnnnnnnnnnnnnnnnnnnnnnnnnnnnnnnnnnnnnnnnnnnnnnnnnnnnnnnnnnnnnnnnnnnnnnnnnnnnnnnnnnnnnnnnnnnnnnnnnnnnnnnnnnnnnnnnnnnnnnnnnnnnnnnnnnnnnnnnnnnnnnnnnnnnnnnnnnnnnnnnnnnnnnnnnnnnnnnnnnnnnnnnnnnnnnnnnnnnnnnnnnnnnnnnnnnnnnnnnnnnnnnnnnnnnnnnnnnnnnnnnnnnnnnnnnnnnnnnnnnnnnnnnnnnnnnnnnnnnnnnnnnnnnnnnnnnnnnnnnnnnnnnnnnnnnnnnnnnnnnnnnnnnnnnnnnnnnnnnnnnnnnnnnnnnnnnnnnnnnnnnnnnnnnnnnnnnnnnnnnnnnnnnnnnnnnnnnnnnnnnnnnnnnnnnnnnnnnnnnnnnnnnnnnnnnnnnnnnnnnnnnnnnnnnnnnnnnnnnnnnnnnnnnnnnnnnnnnnnnnnnnnnnnnnnnnnnnnnnnnnnnnnnnnnnnnnnnnnnnnnnnnnnnnnnnnnnnnnnnnnnnnnnnnnnnnnnnnnnnnnnnnnnnnnnnnnnnnnnnnnnnnnnnnnnnnnnnnnnnnnnnnnnnnnnnnnnnnnnnnnnnnnnnnnnnnnnnnnnnnnnnnnnnnnnnnnnnnnnnnnnnnnnnnnnnnnnnnnnnnnnnnnnnnnnnnnnnnnnnnnnnnnnnnnnnnnnnnnnnnnnnnnnnnnnnnnnnnnnnnnnnnnnnnnnnnnnnnnnnnnnnnnnnnnnnnnnnnnnnnnnnnnnnnnnnnnnnnnnnnnnnnnnnnnnnnnnnnnnnnnnnnnnnnnnnnnnnnnnnnnnnnnnnnnnnnnnnnnnnnnnnnnnnnnnnnnnnnnnnnnnnnnnnnnnnnnnnnnnnnnnnnnnnnnnnnnnnnnnnnnnnnnnnnnnnnnnnnnnnnnnnnnnnnnnnnnnnnnnnnnnnnnnnnnnnnnnnnnnnnnnnnnnnnnnnnnnnnnnnnnnnnnnnnnnnnnnnnnnnnnnnnnnnnnnnnnnnnnnnnnnnnnnnnnnnnnnnnnnnnnnnnnnnnnnnnnnnnnnnnnnnnnnnnnnnnnnnnnnnnnnnnnnnnnnnnnnnnnnnnnnnnnnnnnnnnnnnnnnnnnnnnnnnnnnnnnnnnnnnnnnnnnnnnnnnnnnnnnnnnnnnnnnnnnnnnnnnnnnnnnnnnnnnnnnnnnnnnnnnnnnnnnnnnnnnnnnnnnnnnnnnnnnnnnnnnnnnnnnnnnnnnnnnnnnnnnnnnnnnnnnnnnnnnnnnnnnnnnnnnnnnnnnnnnnnnnnnnnnnnnnnnnnnnnnnnnnnnnnnnnnnnnnnnnnnnnnnnnnnnnnnnnnnnnnnnnnnnnnnnnnnnnnnnnnnnnnnnnnnnnnnnnnnnnnnnnnnnnnnnnnnnnnnnnnnnnnnnnnnnnnnnnnnnnnnnnnnnnnnnnnnnnnnnnnnnnnnnnnnnnnnnnnnnnnnnnnnnnnnnnnnnnnnnnnnnnnnnnnnnnnnnnnnnnnnnnnnnnnnnnnnnnnnnnnnnnnnnnnnnnnnnnnnnnnnnnnnnnnnnnnnnnnnnnnnnnnnnnnnnnnnnnnnnnnnnnnnnnnnnnnnnnnnnnnnnnnnnnnnnnnnnnnnnnnnnnnnnnnnnnnnnnnnnnnnnnnnnnnnnnnnnnnnnnnnnnnnnnnnnnnnnnnnnnnnnnnnnnnnnnnnnnnnnnnnnnnnnnnnnnnnnnnnnnnnnnnnnnnnnnnnnnnnnnnnnnnnnnnnnnnnnnnnnnnnnnnnnnnnnnnnnnnnnnnnnnnnnnnnnnnnnnnnnnnnnnnnnnnnnnnnnnnnnnnnnnnnnnnnnnnnnnnnnnnnnnnnnnnnnnnnnnnnnnnnnnnnnnnnnnnnnnnnnnnnnnnnnnnnnnnnnnnnnnnnnnnnnnnnnnnnnnnnnnnnnnnnnnnnnnnnnnnnnnnnnnnnnnnnnnnnnnnnnnnnnnnnnnnnnnnnnnnnnnnnnnnnnnnnnnnnnnnnnnnnnnnnnnnnnnnnnnnnnnnnnnnnnnnnnnnnnnnnnnnnnnnnnnnnnnnnnnnnnnnnnnnnnnnnnnnnnnnnnnnnnnnnnnnnnnnnnnnnnnnnnnnnnnnnnnnnnnnnnnnnnnnnnnnnnnnnnnnnnnnnnnnnnnnnnnnnnnnnnnnnnnnnnnnnnnnnnnnnnnnnnnnnnnnnnnnnnnnnnnnnnnnnnnnnnnnnnnnnnnnnnnnnnnnnnnnnnnnnnnnnnnnnnnnnnnnnnnnnnnnnnnnnnnnnnnnnnnnnnnnnnnnnnnnnnnnnnnnnnnnnnnnnnnnnnnnnnnnnnnnnnnnnnnnnnnnnnnnnnnnnnnnnnnnnnnnnnnnnnnnnnnnnnnnnnnnnnnnnnnnnnnnnnnnnnnnnnnnnnnnnnnnnnnnnnnnnnnnnnnnnnnnnnnnnnnnnnnnnnnnnnnnnnnnnnnnnnnnnnnnnnnnnnnnnnnnnnnnnnnnnnnnnnnnnnnnnnnnnnnnnnnnnnnnnnnnnnnnnnnnnnnnnnnnnnnnnnnnnnnnnnnnnnnnnnnnnnnnnnnnnnnnnnnnnnnnnnnnnnnnnnnnnnnnnnnnnnnnnnnnnnnnnnnnnnnnnnnnnnnnnnnnnnnnnnnnnnnnnnnnnnnnnnnnnnnnnnnnnnnnnnnnnnnnnnnnnnnnnnnnnnnnnnnnnnnnnnnnnnnnnnnnnnnnnnnnnnnnnnnnnnnnnnnnnnnnnnnnnnnnnnnnnnnnnnnnnnnnnnnnnnnnnnnnnnnnnnnnnnnnnnnnnnnnnnnnnnnnnnnnnnnnnnnnnnnnnnnnnnnnnnnnnnnnnnnnnnnnnnnnnnnnnnnnnnnnnnnnnnnnnnnnnnnnnnnnnnnnnnnnnnnnnnnnnnnnnnnnnnnnnnnnnnnnnnnnnnnnnnnnnnnnnnnnnnnnnnnnnnnnnnnnnnnnnnnnnnnnnnnnnnnnnnnnnnnnnnnnnnnnnnnnnnnnnnnnnnnnnnnnnnnnnnnnnnnnnnnnnnnnnnnnnnnnnnnnnnnnnnnnnnnnnnnnnnnnnnnnnnnnnnnnnnnnnnnnnnnnnnnnnnnnnnnnnnnnnnnnnnnnnnnnnnnnnnnnnnnnnnnnnnnnnnnnnnnnnnnnnnnnnnnnnnnnnnnnnnnnnnnnnnnnnnnnnnnnnnnnnnnnnnnnnnnnnnnnnnnnnnnnnnnnnnnnnnnnnnnnnnnnnnnnnnnnnnnnnnnnnnnnnnnnnnnnnnnnnnnnnnnnnnnnnnnnnnnnnnnnnnnnnnnnnnnnnnnnnnnnnnnnnnnnnnnnnnnnnnnnnnnnnnnnnnnnnnnnnnnnnnnnnnnnnnnnnnnnnnnnnnnnnnnnnnnnnnnnnnnnnnnnnnnnnnnnnnnnnnnnnnnnnnnnnnnnnnnnnnnnnnnnnnnnnnnnnnnnnnnnnnnnnnnnnnnnnnnnnnnnnnnnnnnnnnnnnnnnnnnnnnnnnnnnnnnnnnnnnnnnnnnnnnnnnnnnnnnnnnnnnnnnnnnnnnnnnnnnnnnnnnnnnnnnnnnnnnnnnnnnnnnnnnnnnnnnnnnnnnnnnnnnnnnnnnnnnnnnnnnnnnnnnnnnnnnnnnnnnnnnnnnnnnnnnnnnnnnnnnnnnnnnnnnnnnnnnnnnnnnnnnnnnnnnnnnnnnnnnnnnnnnnnnnnnnnnnnnnnnnnnnnnnnnnnnnnnnnnnnnnnnnnnnnnnnnnnnnnnnnnnnnnnnnnnnnnnnnnnnnnnnnnnnnnnnnnnnnnnnnnnnnnnnnnnnnnnnnnnnnnnnnnnnnnnnnnnnnnnnnnnnnnnnnnnnnnnnnnnnnnnnnnnnnnnnnnnnnnnnnnnnnnnnnnnnnnnnnnnnnnnnnnnnnnnnnnnnnnnnnnnnnnnnnnnnnnnnnnnnnnnnnnnnnnnnnnnnnnnnnnnnnnnnnnnnnnnnnnnnnnnnnnnnnnnnnnnnnnnnnnnnnnnnnnnnnnnnnnnnnnnnnnnnnnnnnnnnnnnnnnnnnnnnnnnnnnnnnnnnnnnnnnnnnnnnnnnnnnnnnnnnnnnnnnnnnnnnnnnnnnnnnnnnnnnnnnnnnnnnnnnnnnnnnnnnnnnnnnnnnnnnnnnnnnnnnnnnnnnnnnnnnnnnnnnnnnnnnnnnnnnnnnnnnnnnnnnnnnnnnnnnnnnnnnnnnnnnnnnnnnnnnnnnnnnnnnnnnnnnnnnnnnnnnnnnnnnnnnnnnnnnnnnnnnnnnnnnnnnnnnnnnnnnnnnnnnnnnnnnnnnnnnnnnnnnnnnnnnnnnnnnnnnnnnnnnnnnnnnnnnnnnnnnnnnnnnnnnnnnnnnnnnnnnnnnnnnnnnnnnnnnnnnnnnnnnnnnnnnnnnnnnnnnnnnnnnnnnnnnnnnnnnnnnnnnnnnnnnnnnnnnnnnnnnnnnnnnnnnnnnnnnnnnnnnnnnnnnnnnnnnnnnnnnnnnnnnnnnnnnnnnnnnnnnnnnnnnnnnnnnnnnnnnnnnnnnnnnnnnnnnnnnnnnnnnnnnnnnnnnnnnnnnnnnnnnnnnnnnnnnnnnnnnnnnnnnnnnnnnnnnnnnnnnnnnnnnnnnnnnnnnnnnnnnnnnnnnnnnnnnnnnnnnnnnnnnnnnnnnnnnnnnnnnnnnnnnnnnnnnnnnnnnnnnnnnnnnnnnnnnnnnnnnnnnnnnnnnnnnnnnnnnnnnnnnnnnnnnnnnnnnnnnnnnnnnnnnnnnnnnnnnnnnnnnnnnnnnnnnnnnnnnnnnnnnnnnnnnnnnnnnnnnnnnnnnnnnnnnnnnnnnnnnnnnnnnnnnnnnnnnnnnnnnnnnnnnnnnnnnnnnnnnnnnnnnnnnnnnnnnnnnnnnnnnnnnnnnnnnnnnnnnnnnnnnnnnnnnnnnnnnnnnnnnnnnnnnnnnnnnnnnnnnnnnnnnnnnnnnnnnnnnnnnnnnnnnnnnnnnnnnnnnnnnnnnnnnnnnnnnnnnnnnnnnnnnnnnnnnnnnnnnnnnnnnnnnnnnnnnnnnnnnnnnnnnnnnnnnnnnnnnnnnnnnnnnnnnnnnnnnnnnnnnnnnnnnnnnnnnnnnnnnnnnnnnnnnnnnnnnnnnnnnnnnnnnnnnnnnnnnnnnnnnnnnnnnnnnnnnnnnnnnnnnnnnnnnnnnnnnnnnnnnnnnnnnnnnnnnnnnnnnnnnnnnnnnnnnnnnnnnnnnnnnnnnnnnnnnnnnnnnnnnnnnnnnnnnnnnnnnnnnnnnnnnnnnnnnnnnnnnnnnnnnnnnnnnnnnnnnnnnnnnnnnnnnnnnnnnnnnnnnnnnnnnnnnnnnnnnnnnnnnnnnnnnnnnnnnnnnnnnnnnnnnnnnnnnnnnnnnnnnnnnnnnnnnnnnnnnnnnnnnnnnnnnnnnnnnnnnnnnnnnnnnnnnnnnnnnnnnnnnnnnnnnnnnnnnnnnnnnnnnnnnnnnnnnnnnnnnnnnnnnnnnnnnnnnnnnnnnnnnnnnnnnnnnnnnnnnnnnnnnnnnnnnnnnnnnnnnnnnnnnnnnnnnnnnnnnnnnnnnnnnnnnnnnnnnnnnnnnnnnnnnnnnnnnnnnnnnnnnnnnnnnnnnnnnnnnnnnnnnnnnnnnnnnnnnnnnnnnnnnnnnnnnnnnnnnnnnnnnnnnnnnnnnnnnnnnnnnnnnnnnnnnnnnnnnnnnnnnnnnnnnnnnnnnnnnnnnnnnnnnnnnnnnnnnnnnnnnnnnnnnnnnnnnnnnnnnnnnnnnnnnnnnnnnnnnnnnnnnnnnnnnnnnnnnnnnnnnnnnnnnnnnnnnnnnnnnnnnnnnnnnnnnnnnnnnnnnnnnnnnnnnnnnnnnnnnnnnnnnnnnnnnnnnnnnnnnnnnnnnnnnnnnnnnnnnnnnnnnnnnnnnnnnnnnnnnnnnnnnnnnnnnnnnnnnnnnnnnnnnnnnnnnnnnnnnnnnnnnnnnnnnnnnnnnnnnnnnnnnnnnnnnnnnnnnnnnnnnnnnnnnnnnnnnnnnnnnnnnnnnnnnnnnnnnnnnnnnnnnnnnnnnnnnnnnnnnnnnnnnnnnnnnnnnnnnnnnnnnnnnnnnnnnnnnnnnnnnnnnnnnnnnnnnnnnnnnnnnnnnnnnnnnnnnnnnnnnnnnnnnnnnnnnnnnnnnnnnnnnnnnnnnnnnnnnnnnnnnnnnnnnnnnnnnnnnnnnnnnnnnnnnnnnnnnnnnnnnnnnnnnnnnnnnnnnnnnnnnnnnnnnnnnnnnnnnnnnnnnnnnnnnnnnnnnnnnnnnnnnnnnnnnnnnnnnnnnnnnnnnnnnnnnnnnnnnnnnnnnnnnnnnnnnnnnnnnnnnnnnnnnnnnnnnnnnnnnnnnnnnnnnnnnnnnnnnnnnnnnnnnnnnnnnnnnnnnnnnnnnnnnnnnnnnnnnnnnnnnnnnnnnnnnnnnnnnnnnnnnnnnnnnnnnnnnnnnnnnnnnnnnnnnnnnnnnnnnnnnnnnnnnnnnnnnnnnnnnnnnnnnnnnnnnnnnnnnnnnnnnnnnnnnnnnnnnnnnnnnnnnnnnnnnnnnnnnnnnnnnnnnnnnnnnnnnnnnnnnnnnnnnnnnnnnnnnnnnnnnnnnnnnnnnnnnnnnnnnnnnnnnnnnnnnnnnnnnnnnnnnnnnnnnnnnnnnnnnnnnnnnnnnnnnnnnnnnnnnnnnnnnnnnnnnnnnnnnnnnnnnnnnnnnnnnnnnnnnnnnnnnnnnnnnnnnnnnnnnnnnnnnnnnnnnnnnnnnnnnnnnnnnnnnnnnnnnnnnnnnnnnnnnnnnnnnnnnnnnnnnnnnnnnnnnnnnnnnnnnnnnnnnnnnnnnnnnnnnnnnnnnnnnnnnnnnnnnnnnnnnnnnnnnnnnnnnnnnnnnnnnnnnnnnnnnnnnnnnnnnnnnnnnnnnnnnnnnnnnnnnnnnnnnnnnnnnnnnnnnnnnnnnnnnnnnnnnnnnnnnnnnnnnnnnnnnnnnnnnnnnnnnnnnnnnnnnnnnnnnnnnnnnnnnnnnnnnnnnnnnnnnnnnnnnnnnnnnnnnnnnnnnnnnnnnnnnnnnnnnnnnnnnnnnnnnnnnnnnnnnnnnnnnnnnnnnnnnnnnnnnnnnnnnnnnnnnnnnnnnnnnnnnnnnnnnnnnnnnnnnnnnnnnnnnnnnnnnnnnnnnnnnnnnnnnnnnnnnnnnnnnnnnnnnnnnnnnnnnnnnnnnnnnnnnnnnnnnnnnnnnnnnnnnnnnnnnnnnnnnnnnnnnnnnnnnnnnnnnnnnnnnnnnnnnnnnnnnnnnnnnnnnnnnnnnnnnnnnnnnnnnnnnnnnnnnnnnnnnnnnnnnnnnnnnnnnnnnnnnnnnnnnnnnnnnnnnnnnnnnnnnnnnnnnnnnnnnnnnnnnnnnnnnnnnnnnnnnnnnnnnnnnnnnnnnnnnnnnnnnnnnnnnnnnnnnnnnnnnnnnnnnnnnnnnnnnnnnnnnnnnnnnnnnnnnnnnnnnnnnnnnnnnnnnnnnnnnnnnnnnnnnnnnnnnnnnnnnnnnnnnnnnnnnnnnnnnnnnnnnnnnnnnnnnnnnnnnnnnnnnnnnnnnnnnnnnnnnnnnnnnnnnnnnnnnnnnnnnnnnnnnnnnnnnnnnnnnnnnnnnnnnnnnnnnnnnnnnnnnnnnnnnnnnnnnnnnnnnnnnnnnnnnnnnnnnnnnnnnnnnnnnnnnnnnnnnnnnnnnnnnnnnnnnnnnnnnnnnnnnnnnnnnnnnnnnnnnnnnnnnnnnnnnnnnnnnnnnnnnnnnnnnnnnnnnnnnnnnnnnnnnnnnnnnnnnnnnnnnnnnnnnnnnnnnnnnnnnnnnnnnnnnnnnnnnnnnnnnnnnnnnnnnnnnnnnnnnnnnnnnnnnnnnnnnnnnnnnnnnnnnnnnnnnnnnnnnnnnnnnnnnnnnnnnnnnnnnnnnnnnnnnnnnnnnnnnnnnnnnnnnnnnnnnnnnnnnnnnnnnnnnnnnnnnnnnnnnnnnnnnnnnnnnnnnnnnnnnnnnnnnnnnnnnnnnnnnnnnnnnnnnnnnnnnnnnnnnnnnnnnnnnnnnnnnnnnnnnnnnnnnnnnnnnnnnnnnnnnnnnnnnnnnnnnnnnnnnnnnnnnnnnnnnnnnnnnnnnnnnnnnnnnnnnnnnnnnnnnnnnnnnnnnnnnnnnnnnnnnnnnnnnnnnnnnnnnnnnnnnnnnnnnnnnnnnnnnnnnnnnnnnnnnnnnnnnnnnnnnnnnnnnnnnnnnnnnnnnnnnnnnnnnnnnnnnnnnnnnnnnnnnnnnnnnnnnnnnnnnnnnnnnnnnnnnnnnnnnnnnnnnnnnnnnnnnnnnnnnnnnnnnnnnnnnnnnnnnnnnnnnnnnnnnnnnnnnnnnnnnnnnnnnnnnnnnnnnnnnnnnnnnnnnnnnnnnnnnnnnnnnnnnnnnnnnnnnnnnnnnnnnnnnnnnnnnnnnnnnnnnnnnnnnnnnnnnnnnnnnnnnnnnnnnnnnnnnnnnnnnnnnnnnnnnnnnnnnnnnnnnnnnnnnnnnnnnnnnnnnnnnnnnnnnnnnnnnnnnnnnnnnnnnnnnnnnnnnnnnnnnnnnnnnnnnnnnnnnnnnnnnnnnnnnnnnnnnnnnnnnnnnnnnnnnnnnnnnnnnnnnnnnnnnnnnnnnnnnnnnnnnnnnnnnnnnnnnnnnnnnnnnnnnnnnnnnnnnnnnnnnnnnnnnnnnnnnnnnnnnnnnnnnnnnnnnnnnnnnnnnnnnnnnnnnnnnnnnnnnnnnnnnnnnnnnnnnnnnnnnnnnnnnnnnnnnnnnnnnnnnnnnnnnnnnnnnnnnnnnnnnnnnnnnnnnnnnnnnnnnnnnnnnnnnnnnnnnnnnnnnnnnnnnnnnnnnnnnnnnnnnnnnnnnnnnnnnnnnnnnnnnnnnnnnnnnnnnnnnnnnnnnnnnnnnnnnnnnnnnnnnnnnnnnnnnnnnnnnnnnnnnnnnnnnnnnnnnnnnnnnnnnnnnnnnnnnnnnnnnnnnnnnnnnnnnnnnnnnnnnnnnnnnnnnnnnnnnnnnnnnnnnnnnnnnnnnnnnnnnnnnnnnnnnnnnnnnnnnnnnnnnnnnnnnnnnnnnnnnnnnnnnnnnnnnnnnnnnnnnnnnnnnnnnnnnnnnnnnnnnnnnnnnnnnnnnnnnnnnnnnnnnnnnnnnnnnnnnnnnnnnnnnnnnnnnnnnnnnnnnnnnnnnnnnnnnnnnnnnnnnnnnnnnnnnnnnnnnnnnnnnnnnnnnnnnnnnnnnnnnnnnnnnnnnnnnnnnnnnnnnnnnnnnnnnnnnnnnnnnnnnnnnnnnnnnnnnnnnnnnnnnnnnnnnnnnnnnnnnnnnnnnnnnnnnnnnnnnnnnnnnnnnnnnnnnnnnnnnnnnnnnnnnnnnnnnnnnnnnnnnnnnnnnnnnnnnnnnnnnnnnnnnnnnnnnnnnnnnnnnnnnnnnnnnnnnnnnnnnnnnnnnnnnnnnnnnnnnnnnnnnnnnnnnnnnnnnnnnnnnnnnnnnnnnnnnnnnnnnnnnnnnnnnnnnnnnnnnnnnnnnnnnnnnnnnnnnnnnnnnnnnnnnnnnnnnnnnnnnnnnnnnnnnnnnnnnnnnnnnnnnnnnnnnnnnnnnnnnnnnnnnnnnnnnnnnnnnnnnnnnnnnnnnnnnnnnnnnnnnnnnnnnnnnnnnnnnnnnnnnnnnnnnnnnnnnnnnnnnnnnnnnnnnnnnnnnnnnnnnnnnnnnnnnnnnnnnnnnnnnnnnnnnnnnnnnnnnnnnnnnnnnnnnnnnnnnnnnnnnnnnnnnnnnnnnnnnnnnnnnnnnnnnnnnnnnnnnnnnnnnnnnnnnnnnnnnnnnnnnnnnnnnnnnnnnnnnnnnnnnnnnnnnnnnnnnnnnnnnnnnnnnnnnnnnnnnnnnnnnnnnnnnnnnnnnnnnnnnnnnnnnnnnnnnnnnnnnnnnnnnnnnnnnnnnnnnnnnnnnnnnnnnnnnnnnnnnnnnnnnnnnnnnnnnnnnnnnnnnnnnnnnnnnnnnnnnnnnnnnnnnnnnnnnnnnnnnnnnnnnnnnnnnnnnnnnnnnnnnnnnnnnnnnnnnnnnnnnnnnnnnnnnnnnnnnnnnnnnnnnnnnnnnnnnnnnnnnnnnnnnnnnnnnnnnnnnnnnnnnnnnnnnnnnnnnnnnnnnnnnnnnnnnnnnnnnnnnnnnnnnnnnnnnnnnnnnnnnnnnnnnnnnnnnnnnnnnnnnnnnnnnnnnnnnnnnnnnnnnnnnnnnnnnnnnnnnnnnnnnnnnnnnnnnnnnnnnnnnnnnnnnnnnnnnnnnnnnnnnnnnnnnnnnnnnnnnnnnnnnnnnnnnnnnnnnnnnnnnnnnnnnnnnnnnnnnnnnnnnnnnnnnnnnnnnnnnnnnnnnnnnnnnnnnnnnnnnnnnnnnnnnnnnnnnnnnnnnnnnnnnnnnnnnnnnnnnnnnnnnnnnnnnnnnnnnnnnnnnnnnnnnnnnnnnnnnnnnnnnnnnnnnnnnnnnnnnnnnnnnnnnnnnnnnnnnnnnnnnnnnnnnnnnnnnnnnnnnnnnnnnnnnnnnnnnnnnnnnnnnnnnnnnnnnnnnnnnnnnnnnnnnnnnnnnnnnnnnnnnnnnnnnnnnnnnnnnnnnnnnnnnnnnnnnnnnnnnnnnnnnnnnnnnnnnnnnnnnnnnnnnnnnnnnnnnnnnnnnnnnnnnnnnnnnnnnnnnnnnnnnnnnnnnnnnnnnnnnnnnnnnnnnnnnnnnnnnnnnnnnnnnnnnnnnnnnnnnnnnnnnnnnnnnnnnnnnnnnnnnnnnnnnnnnnnnnnnnnnnnnnnnnnnnnnnnnnnnnnnnnnnnnnnnnnnnnnnnnnnnnnnnnnnnnnnnnnnnnnnnnnnnnnnnnnnnnnnnnnnnnnnnnnnnnnnnnnnnnnnnnnnnnnnnnnnnnnnnnnnnnnnnnnnnnnnnnnnnnnnnnnnnnnnnnnnnnnnnnnnnnnnnnnnnnnnnnnnnnnnnnnnnnnnnnnnnnnnnnnnnnnnnnnnnnnnnnnnnnnnnnnnnnnnnnnnnnnnnnnnnnnnnnnnnnnnnnnnnnnnnnnnnnnnnnnnnnnnnnnnnnnnnnnnnnnnnnnnnnnnnnnnnnnnnnnnnnnnnnnnnnnnnnnnnnnnnnnnnnnnnnnnnnnnnnnnnnnnnnnnnnnnnnnnnnnnnnnnnnnnnnnnnnnnnnnnnnnnnnnnnnnnnnnnnnnnnnnnnnnnnnnnnnnnnnnnnnnnnnnnnnnnnnnnnnnnnnnnnnnnnnnnnnnnnnnnnnnnnnnnnnnnnnnnnnnnnnnnnnnnnnnnnnnnnnnnnnnnnnnnnnnnnnnnnnnnnnnnnnnnnnnnnnnnnnnnnnnnnnnnnnnnnnnnnnnnnnnnnnnnnnnnnnnnnnnnnnnnnnnnnnnnnnnnnnnnnnnnnnnnnnnnnnnnnnnnnnnnnnnnnnnnnnnnnnnnnnnnnnnnnnnnnnnnnnnnnnnnnnnnnnnnnnnnnnnnnnnnnnnnnnnnnnnnnnnnnnnnnnnnnnnnnnnnnnnnnnnnnnnnnnnnnnnnnnnnnnnnnnnnnnnnnnnnnnnnnnnnnnnnnnnnnnnnnnnnnnnnnnnnnnnnnnnnnnnnnnnnnnnnnnnnnnnnnnnnnnnnnnnnnnnnnnnnnnnnnnnnnnnnnnnnnnnnnnnnnnnnnnnnnnnnnnnnnnnnnnnnnnnnnnnnnnnnnnnnnnnnnnnnnnnnnnnnnnnnnnnnnnnnnnnnnnnnnnnnnnnnnnnnnnnnnnnnnnnnnnnnnnnnnnnnnnnnnnnnnnnnnnnnnnnnnnnnnnnnnnnnnnnnnnnnnnnnnnnnnnnnnnnnnnnnnnnnnnnnnnnnnnnnnnnnnnnnnnnnnnnnnnnnnnnnnnnnnnnnnnnnnnnnnnnnnnnnnnnnnnnnnnnnnnnnnnnnnnnnnnnnnnnnnnnnnnnnnnnnnnnnnnnnnnnnnnnnnnnnnnnnnnnnnnnnnnnnnnnnnnnnnnnnnnnnnnnnnnnnnnnnnnnnnnnnnnnnnnnnnnnnnnnnnnnnnnnnnnnnnnnnnnnnnnnnnnnnnnnnnnnnnnnnnnnnnnnnnnnnnnnnnnnnnnnnnnnnnnnnnnnnnnnnnnnnnnnnnnnnnnnnnnnnnnnnnnnnnnnnnnnnnnnnnnnnnnnnnnnnnnnnnnnnnnnnnnnnnnnnnnnnnnnnnnnnnnnnnnnnnnnnnnnnnnnnnnnnnnnnnnnnnnnnnnnnnnnnnnnnnnnnnnnnnnnnnnnnnnnnnnnnnnnnnnnnnnnnnnnnnnnnnnnnnnnnnnnnnnnnnnnnnnnnnnnnnnnnnnnnnnnnnnnnnnnnnnnnnnnnnnnnnnnnnnnnnnnnnnnnnnnnnnnnnnnnnnnnnnnnnnnnnnnnnnnnnnnnnnnnnnnnnnnnnnnnnnnnnnnnnnnnnnnnnnnnnnnnnnnnnnnnnnnnnnnnnnnnnnnnnnnnnnnnnnnnnnnnnnnnnnnnnnnnnnnnnnnnnnnnnnnnnnnnnnnnnnnnnnnnnnnnnnnnnnnnnnnnnnnnnnnnnnnnnnnnnnnnnnnnnnnnnnnnnnnnnnnnnnnnnnnnnnnnnnnnnnnnnnnnnnnnnnnnnnnnnnnnnnnnnnnnnnnnnnnnnnnnnnnnnnnnnnnnnnnnnnnnnnnnnnnnnnnnnnnnnnnnnnnnnnnnnnnnnnnnnnnnnnnnnnnnnnnnnnnnnnnnnnnnnnnnnnnnnnnnnnnnnnnnnnnnnnnnnnnnnnnnnnnnnnnnnnnnnnnnnnnnnnnnnnnnnnnnnnnnnnnnnnnnnnnnnnnnnnnnnnnnnnnnnnnnnnnnnnnnnnnnnnnnnnnnnnnnnnnnnnnnnnnnnnnnnnnnnnnnnnnnnnnnnnnnnnnnnnnnnnnnnnnnnnnnnnnnnnnnnnnnnnnnnnnnnnnnnnnnnnnnnnnnnnnnnnnnnnnnnnnnnnnnnnnnnnnnnnnnnnnnnnnnnnnnnnnnnnnnnnnnnnnnnnnnnnnnnnnnnnnnnnnnnnnnnnnnnnnnnnnnnnnnnnnnnnnnnnnnnnnnnnnnnnnnnnnnnnnnnnnnnnnnnnnnnnnnnnnnnnnnnnnnnnnnnnnnnnnnnnnnnnnnnnnnnnnnnnnnnnnnnnnnnnnnnnnnnnnnnnnnnnnnnnnnnnnnnnnnnnnnnnnnnnnnnnnnnnnnnnnnnnnnnnnnnnnnnnnnnnnnnnnnnnnnnnnnnnnnnnnnnnnnnnnnnnnnnnnnnnnnnnnnnnnnnnnnnnnnnnnnnnnnnnnnnnnnnnnnnnnnnnnnnnnnnnnnnnnnnnnnnnnnnnnnnnnnnnnnnnnnnnnnnnnnnnnnnnnnnnnnnnnnnnnnnnnnnnnnnnnnnnnnnnnnnnnnnnnnnnnnnnnnnnnnnnnnnnnnnnnnnnnnnnnnnnnnnnnnnnnnnnnnnnnnnnnnnnnnnnnnnnnnnnnnnnnnnnnnnnnnnnnnnnnnnnnnnnnnnnnnnnnnnnnnnnnnnnnnnnnnnnnnnnnnnnnnnnnnnnnnnnnnnnnnnnnnnnnnnnnnnnnnnnnnnnnnnnnnnnnnnnnnnnnnnnnnnnnnnnnnnnnnnnnnnnnnnnnnnnnnnnnnnnnnnnnnnnnnnnnnnnnnnnnnnnnnnnnnnnnnnnnnnnnnnnnnnnnnnnnnnnnnnnnnnnnnnnnnnnnnnnnnnnnnnnnnnnnnnnnnnnnnnnnnnnnnnnnnnnnnnnnnnnnnnnnnnnnnnnnnnnnnnnnnnnnnnnnnnnnnnnnnnnnnnnnnnnnnnnnnnnnnnnnnnnnnnnnnnnnnnnnnnnnnnnnnnnnnnnnnnnnnnnnnnnnnnnnnnnnnnnnnnnnnnnnnnnnnnnnnnnnnnnnnnnnnnnnnnnnnnnnnnnnnnnnnnnnnnnnnnnnnnnnnnnnnnnnnnnnnnnnnnnnnnnnnnnnnnnnnnnnnnnnnnnnnnnnnnnnnnnnnnnnnnnnnnnnnnnnnnnnnnnnnnnnnnnnnnnnnnnnnnnnnnnnnnnnnnnnnnnnnnnnnnnnnnnnnnnnnnnnnnnnnnnnnnnnnnnnnnnnnnnnnnnnnnnnnnnnnnnnnnnnnnnnnnnnnnnnnnnnnnnnnnnnnnnnnnnnnnnnnnnnnnnnnnnnnnnnnnnnnnnnnnnnnnnnnnnnnnnnnnnnnnnnnnnnnnnnnnnnnnnnnnnnnnnnnnnnnnnnnnnnnnnnnnnnnnnnnnnnnnnnnnnnnnnnnnnnnnnnnnnnnnnnnnnnnnnnnnnnnnnnnnnnnnnnnnnnnnnnnnnnnnnnnnnnnnnnnnnnnnnnnnnnnnnnnnnnnnnnnnnnnnnnnnnnnnnnnnnnnnnnnnnnnnnnnnnnnnnnnnnnnnnnnnnnnnnnnnnnnnnnnnnnnnnnnnnnnnnnnnnnnnnnnnnnnnnnnnnnnnnnnnnnnnnnnnnnnnnnnnnnnnnnnnnnnnnnnnnnnnnnnnnnnnnnnnnnnnnnnnnnnnnnnnnnnnnnnnnnnnnnnnnnnnnnnnnnnnnnnnnnnnnnnnnnnnnnnnnnnnnnnnnnnnnnnnnnnnnnnnnnnnnnnnnnnnnnnnnnnnnnnnnnnnnnnnnnnnnnnnnnnnnnnnnnnnnnnnnnnnnnnnnnnnnnnnnnnnnnnnnnnnnnnnnnnnnnnnnnnnnnnnnnnnnnnnnnnnnnnnnnnnnnnnnnnnnnnnnnnnnnnnnnnnnnnnnnnnnnnnnnnnnnnnnnnnnnnnnnnnnnnnnnnnnnnnnnnnnnnnnnnnnnnnnnnnnnnnnnnnnnnnnnnnnnnnnnnnnnnnnnnnnnnnnnnnnnnnnnnnnnnnnnnnnnnnnnnnnnnnnnnnnnnnnnnnnnnnnnnnnnnnnnnnnnnnnnnnnnnnnnnnnnnnnnnnnnnnnnnnnnnnnnnnnnnnnnnnnnnnnnnnnnnnnnnnnnnnnnnnnnnnnnnnnnnnnnnnnnnnnnnnnnnnnnnnnnnnnnnnnnnnnnnnnnnnnnnnnnnnnnnnnnnnnnnnnnnnnnnnnnnnnnnnnnnnnnnnnnnnnnnnnnnnnnnnnnnnnnnnnnnnnnnnnnnnnnnnnnnnnnnnnnnnnnnnnnnnnnnnnnnnnnnnnnnnnnnnnnnnnnnnnnnnnnnnnnnnnnnnnnnnnnnnnnnnnnnnnnnnnnnnnnnnnnnnnnnnnnnnnnnnnnnnnnnnnnnnnnnnnnnnnnnnnnnnnnnnnnnnnnnnnnnnnnnnnnnnnnnnnnnnnnnnnnnnnnnnnnnnnnnnnnnnnnnnnnnnnnnnnnnnnnnnnnnnnnnnnnnnnnnnnnnnnnnnnnnnnnnnnnnnnnnnnnnnnnnnnnnnnnnnnnnnnnnnnnnnnnnnnnnnnnnnnnnnnnnnnnnnnnnnnnnnnnnnnnnnnnnnnnnnnnnnnnnnnnnnnnnnnnnnnnnnnnnnnnnnnnnnnnnnnnnnnnnnnnnnnnnnnnnnnnnnnnnnnnnnnnnnnnnnnnnnnnnnnnnnnnnnnnnnnnnnnnnnnnnnnnnnnnnnnnnnnnnnnnnnnnnnnnnnnnnnnnnnnnnnnnnnnnnnnnnnnnnnnnnnnnnnnnnnnnnnnnnnnnnnnnnnnnnnnnnnnnnnnnnnnnnnnnnnnnnnnnnnnnnnnnnnnnnnnnnnnnnnnnnnnnnnnnnnnnnnnnnnnnnnnnnnnnnnnnnnnnnnnnnnnnnnnnnnnnnnnnnnnnnnnnnnnnnnnnnnnnnnnnnnnnnnnnnnnnnnnnnnnnnnnnnnnnnnnnnnnnnnnnnnnnnnnnnnnnnnnnnnnnnnnnnnnnnnnnnnnnnnnnnnnnnnnnnnnnnnnnnnnnnnnnnnnnnnnnnnnnnnnnnnnnnnnnnnnnnnnnnnnnnnnnnnnnnnnnnnnnnnnnnnnnnnnnnnnnnnnnnnnnnnnnnnnnnnnnnnnnnnnnnnnnnnnnnnnnnnnnnnnnnnnnnnnnnnnnnnnnnnnnnnnnnnnnnnnnnnnnnnnnnnnnnnnnnnnnnnnnnnnnnnnnnnnnnnnnnnnnnnnnnnnnnnnnnnnnnnnnnnnnnnnnnnnnnnnnnnnnnnnnnnnnnnnnnnnnnnnnnnnnnnnnnnnnnnnnnnnnnnnnnnnnnnnnnnnnnnnnnnnnnnnnnnnnnnnnnnnnnnnnnnnnnnnnnnnnnnnnnnnnnnnnnnnnnnnnnnnnnnnnnnnnnnnnnnnnnnnnnnnnnnnnnnnnnnnnnnnnnnnnnnnnnnnnnnnnnnnnnnnnnnnnnnnnnnnnnnnnnnnnnnnnnnnnnnnnnnnnnnnnnnnnnnnnnnnnnnnnnnnnnnnnnnnnnnnnnnnnnnnnnnnnnnnnnnnnnnnnnnnnnnnnnnnnnnnnnnnnnnnnnnnnnnnnnnnnnnnnnnnnnnnnnnnnnnnnnnnnnnnnnnnnnnnnnnnnnnnnnnnnnnnnnnnnnnnnnnnnnnnnnnnnnnnnnnnnnnnnnnnnnnnnnnnnnnnnnnnnnnnnnnnnnnnnnnnnnnnnnnnnnnnnnnnnnnnnnnnnnnnnnnnnnnnnnnnnnnnnnnnnnnnnnnnnnnnnnnnnnnnnnnnnnnnnnnnnnnnnnnnnnnnnnnnnnnnnnnnnnnnnnnnnnnnnnnnnnnnnnnnnnnnnnnnnnnnnnnnnnnnnnnnnnnnnnnnnnnnnnnnnnnnnnnnnnnnnnnnnnnnnnnnnnnnnnnnnnnnnnnnnnnnnnnnnnnnnnnnnnnnnnnnnnnnnnnnnnnnnnnnnnnnnnnnnnnnnnnnnnnnnnnnnnnnnnnnnnnnnnnnnnnnnnnnnnnnnnnnnnnnnnnnnnnnnnnnnnnnnnnnnnnnnnnnnnnnnnnnnnnnnnnnnnnnnnnnnnnnnnnnnnnnnnnnnnnnnnnnnnnnnnnnnnnnnnnnnnnnnnnnnnnnnnnnnnnnnnnnnnnnnnnnnnnnnnnnnnnnnnnnnnnnnnnnnnnnnnnnnnnnnnnnnnnnnnnnnnnnnnnnnnnnnnnnnnnnnnnnnnnnnnnnnnnnnnnnnnnnnnnnnnnnnnnnnnnnnnnnnnnnnnnnnnnnnnnnnnnnnnnnnnnnnnnnnnnnnnnnnnnnnnnnnnnnnnnnnnnnnnnnnnnnnnnnnnnnnnnnnnnnnnnnnnnnnnnnnnnnnnnnnnnnnnnnnnnnnnnnnnnnnnnnnnnnnnnnnnnnnnnnnnnnnnnnnnnnnnnnnnnnnnnnnnnnnnnnnnnnnnnnnnnnnnnnnnnnnnnnnnnnnnnnnnnnnnnnnnnnnnnnnnnnnnnnnnnnnnnnnnnnnnnnnnnnnnnnnnnnnnnnnnnnnnnnnnnnnnnnnnnnnnnnnnnnnnnnnnnnnnnnnnnnnnnnnnnnnnnnnnnnnnnnnnnnnnnnnnnnnnnnnnnnnnnnnnnnnnnnnnnnnnnnnnnnnnnnnnnnnnnnnnnnnnnnnnnnnnnnnnnnnnnnnnnnnnnnnnnnnnnnnnnnnnnnnnnnnnnnnnnnnnnnnnnnnnnnnnnnnnnnnnnnnnnnnnnnnnnnnnnnnnnnnnnnnnnnnnnnnnnnnnnnnnnnnnnnnnnnnnnnnnnnnnnnnnnnnnnnnnnnnnnnnnnnnnnnnnnnnnnnnnnnnnnnnnnnnnnnnnnnnnnnnnnnnnnnnnnnnnnnnnnnnnnnnnnnnnnnnnnnnnnnnnnnnnnnnnnnnnnnnnnnnnnnnnnnnnnnnnnnnnnnnnnnnnnnnnnnnnnnnnnnnnnnnnnnnnnnnnnnnnnnnnnnnnnnnnnnnnnnnnnnnnnnnnnnnnnnnnnnnnnnnnnnnnnnnnnnnnnnnnnnnnnnnnnnnnnnnnnnnnnnnnnnnnnnnnnnnnnnnnnnnnnnnnnnnnnnnnnnnnnnnnnnnnnnnnnnnnnnnnnnnnnnnnnnnnnnnnnnnnnnnnnnnnnnnnnnnnnnnnnnnnnnnnnnnnnnnnnnnnnnnnnnnnnnnnnnnnnnnnnnnnnnnnnnnnnnnnnnnnnnnnnnnnnnnnnnnnnnnnnnnnnnnnnnnnnnnnnnnnnnnnnnnnnnnnnnnnnnnnnnnnnnnnnnnnnnnnnnnnnnnnnnnnnnnnnnnnnnnnnnnnnnnnnnnnnnnnnnnnnnnnnnnnnnnnnnnnnnnnnnnnnnnnnnnnnnnnnnnnnnnnnnnnnnnnnnnnnnnnnnnnnnnnnnnnnnnnnnnnnnnnnnnnnnnnnnnnnnnnnnnnnnnnnnnnnnnnnnnnnnnnnnnnnnnnnnnnnnnnnnnnnnnnnnnnnnnnnnnnnnnnnnnnnnnnnnnnnnnnnnnnnnnnnnnnnnnnnnnnnnnnnnnnnnnnnnnnnnnnnnnnnnnnnnnnnnnnnnnnnnnnnnnnnnnnnnnnnnnnnnnnnnnnnnnnnnnnnnnnnnnnnnnnnnnnnnnnnnnnnnnnnnnnnnnnnnnnnnnnnnnnnnnnnnnnnnnnnnnnnnnnnnnnnnnnnnnnnnnnnnnnnnnnnnnnnnnnnnnnnnnnnnnnnnnnnnnnnnnnnnnnnnnnnnnnnnnnnnnnnnnnnnnnnnnnnnnnnnnnnnnnnnnnnnnnnnnnnnnnnnnnnnnnnnnnnnnnnnnnnnnnnnnnnnnnnnnnnnnnnnnnnnnnnnnnnnnnnnnnnnnnnnnnnnnnnnnnnnnnnnnnnnnnnnnnnnnnnnnnnnnnnnnnnnnnnnnnnnnnnnnnnnnnnnnnnnnnnnnnnnnnnnnnnnnnnnnnnnnnnnnnnnnnnnnnnnnnnnnnnnnnnnnnnnnnnnnnnnnnnnnnnnnnnnnnnnnnnnnnnnnnnnnnnnnnnnnnnnnnnnnnnnnnnnnnnnnnnnnnnnnnnnnnnnnnnnnnnnnnnnnnnnnnnnnnnnnnnnnnnnnnnnnnnnnnnnnnnnnnnnnnnnnnnnnnnnnnnnnnnnnnnnnnnnnnnnnnnnnnnnnnnnnnnnnnnnnnnnnnnnnnnnnnnnnnnnnnnnnnnnnnnnnnnnnnnnnnnnnnnnnnnnnnnnnnnnnnnnnnnnnnnnnnnnnnnnnnnnnnnnnnnnnnnnnnnnnnnnnnnnnnnnnnnnnnnnnnnnnnnnnnnnnnnnnnnnnnnnnnnnnnnnnnnnnnnnnnnnnnnnnnnnnnnnnnnnnnnnnnnnnnnnnnnnnnnnnnnnnnnnnnnnnnnnnnnnnnnnnnnnnnnnnnnnnnnnnnnnnnnnnnnnnnnnnnnnnnnnnnnnnnnnnnnnnnnnnnnnnnnnnnnnnnnnnnnnnnnnnnnnnnnnnnnnnnnnnnnnnnnnnnnnnnnnnnnnnnnnnnnnnnnnnnnnnnnnnnnnnnnnnnnnnnnnnnnnnnnnnnnnnnnnnnnnnnnnnnnnnnnnnnnnnnnnnnnnnnnnnnnnnnnnnnnnnnnnnnnnnnnnnnnnnnnnnnnnnnnnnnnnnnnnnnnnnnnnnnnnnnnnnnnnnnnnnnnnnnnnnnnnnnnnnnnnnnnnnnnnnnnnnnnnnnnnnnnnnnnnnnnnnnnnnnnnnnnnnnnnnnnnnnnnnnnnnnnnnnnnnnnnnnnnnnnnnnnnnnnnnnnnnnnnnnnnnnnnnnnnnnnnnnnnnnnnnnnnnnnnnnnnnnnnnnnnnnnnnnnnnnnnnnnnnnnnnnnnnnnnnnnnnnnnnnnnnnnnnnnnnnnnnnnnnnnnnnnnnnnnnnnnnnnnnnnnnnnnnnnnnnnnnnnnnnnnnnnnnnnnnnnnnnnnnnnnnnnnnnnnnnnnnnnnnnnnnnnnnnnnnnnnnnnnnnnnnnnnnnnnnnnnnnnnnnnnnnnnnnnnnnnnnnnnnnnnnnnnnnnnnnnnnnnnnnnnnnnnnnnnnnnnnnnnnnnnnnnnnnnnnnnnnnnnnnnnnnnnnnnnnnnnnnnnnnnnnnnnnnnnnnnnnnnnnnnnnnnnnnnnnnnnnnnnnnnnnnnnnnnnnnnnnnnnnnnnnnnnnnnnnnnnnnnnnnnnnnnnnnnnnnnnnnnnnnnnnnnnnnnnnnnnnnnnnnnnnnnnnnnnnnnnnnnnnnnnnnnnnnnnnnnnnnnnnnnnnnnnnnnnnnnnnnnnnnnnnnnnnnnnnnnnnnnnnnnnnnnnnnnnnnnnnnnnnnnnnnnnnnnnnnnnnnnnnnnnnnnnnnnnnnnnnnnnnnnnnnnnnnnnnnnnnnnnnnnnnnnnnnnnnnnnnnnnnnnnnnnnnnnnnnnnnnnnnnnnnnnnnnnnnnnnnnnnnnnnnnnnnnnnnnnnnnnnnnnnnnnnnnnnnnnnnnnnnnnnnnnnnnnnnnnnnnnnnnnnnnnnnnnnnnnnnnnnnnnnnnnnnnnnnnnnnnnnnnnnnnnnnnnnnnnnnnnnnnnnnnnnnnnnnnnnnnnnnnnnnnnnnnnnnnnnnnnnnnnnnnnnnnnnnnnnnnnnnnnnnnnnnnnnnnnnnnnnnnnnnnnnnnnnnnnnnnnnnnnnnnnnnnnnnnnnnnnnnnnnnnnnnnnnnnnnnnnnnnnnnnnnnnnnnnnnnnnnnnnnnnnnnnnnnnnnnnnnnnnnnnnnnnnnnnnnnnnnnnnnnnnnnnnnnnnnnnnnnnnnnnnnnnnnnnnnnnnnnnnnnnnnnnnnnnnnnnnnnnnnnnnnnnnnnnnnnnnnnnnnnnnnnnnnnnnnnnnnnnnnnnnnnnnnnnnnnnnnnnnnnnnnnnnnnnnnnnnnnnnnnnnnnnnnnnnnnnnnnnnnnnnnnnnnnnnnnnnnnnnnnnnnnnnnnnnnnnnnnnnnnnnnnnnnnnnnnnnnnnnnnnnnnnnnnnnnnnnnnnnnnnnnnnnnnnnnnnnnnnnnnnnnnnnnnnnnnnnnnnnnnnnnnnnnnnnnnnnnnnnnnnnnnnnnnnnnnnnnnnnnnnnnnnnnnnnnnnnnnnnnnnnnnnnnnnnnnnnnnnnnnnnnnnnnnnnnnnnnnnnnnnnnnnnnnnnnnnnnnnnnnnnnnnnnnnnnnnnnnnnnnnnnnnnnnnnnnnnnnnnnnnnnnnnnnnnnnnnnnnnnnnnnnnnnnnnnnnnnnnnnnnnnnnnnnnnnnnnnnnnnnnnnnnnnnnnnnnnnnnnnnnnnnnnnnnnnnnnnnnnnnnnnnnnnnnnnnnnnnnnnnnnnnnnnnnnnnnnnnnnnnnnnnnnnnnnnnnnnnnnnnnnnnnnnnnnnnnnnnnnnnnnnnnnnnnnnnnnnnnnnnnnnnnnnnnnnnnnnnnnnnnnnnnnnnnnnnnnnnnnnnnnnnnnnnnnnnnnnnnnnnnnnnnnnnnnnnnnnnnnnnnnnnnnnnnnnnnnnnnnnnnnnnnnnnnnnnnnnnnnnnnnnnnnnnnnnnnnnnnnnnnnnnnnnnnnnnnnnnnnnnnnnnnnnnnnnnnnnnnnnnnnnnnnnnnnnnnnnnnnnnnnnnnnnnnnnnnnnnnnnnnnnnnnnnnnnnnnnnnnnnnnnnnnnnnnnnnnnnnnnnnnnnnnnnnnnnnnnnnnnnnnnnnnnnnnnnnnnnnnnnnnnnnnnnnnnnnnnnnnnnnnnnnnnnnnnnnnnnnnnnnnnnnnnnnnnnnnnnnnnnnnnnnnnnnnnnnnnnnnnnnnnnnnnnnnnnnnnnnnnnnnnnnnnnnnnnnnnnnnnnnnnnnnnnnnnnnnnnnnnnnnnnnnnnnnnnnnnnnnnnnnnnnnnnnnnnnnnnnnnnnnnnnnnnnnnnnnnnnnnnnnnnnnnnnnnnnnnnnnnnnnnnnnnnnnnnnnnnnnnnnnnnnnnnnnnnnnnnnnnnnnnnnnnnnnnnnnnnnnnnnnnnnnnnnnnnnnnnnnnnnnnnnnnnnnnnnnnnnnnnnnnnnnnnnnnnnnnnnnnnnnnnnnnnnnnnnnnnnnnnnnnnnnnnnnnnnnnnnnnnnnnnnnnnnnnnnnnnnnnnnnnnnnnnnnnnnnnnnnnnnnnnnnnnnnnnnnnnnnnnnnnnnnnnnnnnnnnnnnnnnnnnnnnnnnnnnnnnnnnnnnnnnnnnnnnnnnnnnnnnnnnnnnnnnnnnnnnnnnnnnnnnnnnnnnnnnnnnnnnnnnnnnnnnnnnnnnnnnnnnnnnnnnnnnnnnnnnnnnnnnnnnnnnnnnnnnnnnnnnnnnnnnnnnnnnnnnnnnnnnnnnnnnnnnnnnnnnnnnnnnnnnnnnnnnnnnnnnnnnnnnnnnnnnnnnnnnnnnnnnnnnnnnnnnnnnnnnnnnnnnnnnnnnnnnnnnnnnnnnnnnnnnnnnnnnnnnnnnnnnnnnnnnnnnnnnnnnnnnnnnnnnnnnnnnnnnnnnnnnnnnnnnnnnnnnnnnnnnnnnnnnnnnnnnnnnnnnnnnnnnnnnnnnnnnnnnnnnnnnnnnnnnnnnnnnnnnnnnnnnnnnnnnnnnnnnnnnnnnnnnnnnnnnnnnnnnnnnnnnnnnnnnnnnnnnnnnnnnnnnnnnnnnnnnnnnnnnnnnnnnnnnnnnnnnnnnnnnnnnnnnnnnnnnnnnnnnnnnnnnnnnnnnnnnnnnnnnnnnnnnnnnnnnnnnnnnnnnnnnnnnnnnnnnnnnnnnnnnnnnnnnnnnnnnnnnnnnnnnnnnnnnnnnnnnnnnnnnnnnnnnnnnnnnnnnnnnnnnnnnnnnnnnnnnnnnnnnnnnnnnnnnnnnnnnnnnnnnnnnnnnnnnnnnnnnnnnnnnnnnnnnnnnnnnnnnnnnnnnnnnnnnnnnnnnnnnnnnnnnnnnnnnnnnnnnnnnnnnnnnnnnnnnnnnnnnnnnnnnnnnnnnnnnnnnnnnnnnnnnnnnnnnnnnnnnnnnnnnnnnnnnnnnnnnnnnnnnnnnnnnnnnnnnnnnnnnnnnnnnnnnnnnnnnnnnnnnnnnnnnnnnnnnnnnnnnnnnnnnnnnnnnnnnnnnnnnnnnnnnnnnnnnnnnnnnnnnnnnnnnnnnnnnnnnnnnnnnnnnnnnnnnnnnnnnnnnnnnnnnnnnnnnnnnnnnnnnnnnnnnnnnnnnnnnnnnnnnnnnnnnnnnnnnnnnnnnnnnnnnnnnnnnnnnnnnnnnnnnnnnnnnnnnnnnnnnnnnnnnnnnnnnnnnnnnnnnnnnnnnnnnnnnnnnnnnnnnnnnnnnnnnnnnnnnnnnnnnnnnnnnnnnnnnnnnnnnnnnnnnnnnnnnnnnnnnnnnnnnnnnnnnnnnnnnnnnnnnnnnnnnnnnnnnnnnnnnnnnnnnnnnnnnnnnnnnnnnnnnnnnnnnnnnnnnnnnnnnnnnnnnnnnnnnnnnnnnnnnnnnnnnnnnnnnnnnnnnnnnnnnnnnnnnnnnnnnnnnnnnnnnnnnnnnnnnnnnnnnnnnnnnnnnnnnnnnnnnnnnnnnnnnnnnnnnnnnnnnnnnnnnnnnnnnnnnnnnnnnnnnnnnnnnnnnnnnnnnnnnnnnnnnnnnnnnnnnnnnnnnnnnnnnnnnnnnnnnnnnnnnnnnnnnnnnnnnnnnnnnnnnnnnnnnnnnnnnnnnnnnnnnnnnnnnnnnnnnnnnnnnnnnnnnnnnnnnnnnnnnnnnnnnnnnnnnnnnnnnnnnnnnnnnnnnnnnnnnnnnnnnnnnnnnnnnnnnnnnnnnnnnnnnnnnnnnnnnnnnnnnnnnnnnnnnnnnnnnnnnnnnnnnnnnnnnnnnnnnnnnnnnnnnnnnnnnnnnnnnnnnnnnnnnnnnnnnnnnnnnnnnnnnnnnnnnnnnnnnnnnnnnnnnnnnnnnnnnnnnnnnnnnnnnnnnnnnnnnnnnnnnnnnnnnnnnnnnnnnnnnnnnnnnnnnnnnnnnnnnnnnnnnnnnnnnnnnnnnnnnnnnnnnnnnnnnnnnnnnnnnnnnnnnnnnnnnnnnnnnnnnnnnnnnnnnnnnnnnnnnnnnnnnnnnnnnnnnnnnnnnnnnnnnnnnnnnnnnnnnnnnnnnnnnnnnnnnnnnnnnnnnnnnnnnnnnnnnnnnnnnnnnnnnnnnnnnnnnnnnnnnnnnnnnnnnnnnnnnnnnnnnnnnnnnnnnnnnnnnnnnnnnnnnnnnnnnnnnnnnnnnnnnnnnnnnnnnnnnnnnnnnnnnnnnnnnnnnnnnnnnnnnnnnnnnnnnnnnnnnnnnnnnnnnnnnnnnnnnnnnnnnnnnnnnnnnnnnnnnnnnnnnnnnnnnnnnnnnnnnnnnnnnnnnnnnnnnnnnnnnnnnnnnnnnnnnnnnnnnnnnnnnnnnnnnnnnnnnnnnnnnnnnnnnnnnnnnnnnnnnnnnnnnnnnnnnnnnnnnnnnnnnnnnnnnnnnnnnnnnnnnnnnnnnnnnnnnnnnnnnnnnnnnnnnnnnnnnnnnnnnnnnnnnnnnnnnnnnnnnnnnnnnnnnnnnnnnnnnnnnnnnnnnnnnnnnnnnnnnnnnnnnnnnnnnnnnnnnnnnnnnnnnnnnnnnnnnnnnnnnnnnnnnnnnnnnnnnnnnnnnnnnnnnnnnnnnnnnnnnnnnnnnnnnnnnnnnnnnnnnnnnnnnnnnnnnnnnnnnnnnnnnnnnnnnnnnnnnnnnnnnnnnnnnnnnnnnnnnnnnnnnnnnnnnnnnnnnnnnnnnnnnnnnnnnnnnnnnnnnnnnnnnnnnnnnnnnnnnnnnnnnnnnnnnnnnnnnnnnnnnnnnnnnnnnnnnnnnnnnnnnnnnnnnnnnnnnnnnnnnnnnnnnnnnnnnnnnnnnnnnnnnnnnnnnnnnnnnnnnnnnnnnnnnnnnnnnnnnnnnnnnnnnnnnnnnnnnnnnnnnnnnnnnnnnnnnnnnnnnnnnnnnnnnnnnnnnnnnnnnnnnnnnnnnnnnnnnnnnnnnnnnnnnnnnnnnnnnnnnnnnnnnnnnnnnnnnnnnnnnnnnnnnnnnnnnnnnnnnnnnnnnnnnnnnnnnnnnnnnnnnnnnnnnnnnnnnnnnnnnnnnnnnnnnnnnnnnnnnnnnnnnnnnnnnnnnnnnnnnnnnnnnnnnnnnnnnnnnnnnnnnnnnnnnnnnnnnnnnnnnnnnnnnnnnnnnnnnnnnnnnnnnnnnnnnnnnnnnnnnnnnnnnnnnnnnnnnnnnnnnnnnnnnnnnnnnnnnnnnnnnnnnnnnnnnnnnnnnnnnnnnnnnnnnnnnnnnnnnnnnnnnnnnnnnnnnnnnnnnnnnnnnnnnnnnnnnnnnnnnnnnnnnnnnnnnnnnnnnnnnnnnnnnnnnnnnnnnnnnnnnnnnnnnnnnnnnnnnnnnnnnnnnnnnnnnnnnnnnnnnnnnnnnnnnnnnnnnnnnnnnnnnnnnnnnnnnnnnnnnnnnnnnnnnnnnnnnnnnnnnnnnnnnnnnnnnnnnnnnnnnnnnnnnnnnnnnnnnnnnnnnnnnnnnnnnnnnnnnnnnnnnnnnnnnnnnnnnnnnnnnnnnnnnnnnnnnnnnnnnnnnnnnnnnnnnnnnnnnnnnnnnnnnnnnnnnnnnnnnnnnnnnnnnnnnnnnnnnnnnnnnnnnnnnnnnnnnnnnnnnnnnnnnnnnnnnnnnnnnnnnnnnnnnnnnnnnnnnnnnnnnnnnnnnnnnnnnnnnnnnnnnnnnnnnnnnnnnnnnnnnnnnnnnnnnnnnnnnnnnnnnnnnnnnnnnnnnnnnnnnnnnnnnnnnnnnnnnnnnnnnnnnnnnnnnnnnnnnnnnnnnnnnnnnnnnnnnnnnnnnnnnnnnnnnnnnnnnnnnnnnnnnnnnnnnnnnnnnnnnnnnnnnnnnnnnnnnnnnnnnnnnnnnnnnnnnnnnnnnnnnnnnnnnnnnnnnnnnnnnnnnnnnnnnnnnnnnnnnnnnnnnnnnnnnnnnnnnnnnnnnnnnnnnnnnnnnnnnnnnnnnnnnnnnnnnnnnnnnnnnnnnnnnnnnnnnnnnnnnnnnnnnnnnnnnnnnnnnnnnnnnnnnnnnnnnnnnnnnnnnnnnnnnnnnnnnnnnnnnnnnnnnnnnnnnnnnnnnnnnnnnnnnnnnnnnnnnnnnnnnnnnnnnnnnnnnnnnnnnnnnnnnnnnnnnnnnnnnnnnnnnnnnnnnnnnnnnnnnnnnnnnnnnnnnnnnnnnnnnnnnnnnnnnnnnnnnnnnnnnnnnnnnnnnnnnnnnnnnnnnnnnnnnnnnnnnnnnnnnnnnnnnnnnnnnnnnnnnnnnnnnnnnnnnnnnnnnnnnnnnnnnnnnnnnnnnnnnnnnnnnnnnnnnnnnnnnnnnnnnnnnnnnnnnnnnnnnnnnnnnnnnnnnnnnnnnnnnnnnnnnnnnnnnnnnnnnnnnnnnnnnnnnnnnnnnnnnnnnnnnnnnnnnnnnnnnnnnnnnnnnnnnnnnnnnnnnnnnnnnnnnnnnnnnnnnnnnnnnnnnnnnnnnnnnnnnnnnnnnnnnnnnnnnnnnnnnnnnnnnnnnnnnnnnnnnnnnnnnnnnnnnnnnnnnnnnnnnnnnnnnnnnnnnnnnnnnnnnnnnnnnnnnnnnnnnnnnnnnnnnnnnnnnnnnnnnnnnnnnnnnnnnnnnnnnnnnnnnnnnnnnnnnnnnnnnnnnnnnnnnnnnnnnnnnnnnnnnnnnnnnnnnnnnnnnnnnnnnnnnnnnnnnnnnnnnnnnnnnnnnnnnnnnnnnnnnnnnnnnnnnnnnnnnnnnnnnnnnnnnnnnnnnnnnnnnnnnnnnnnnnnnnnnnnnnnnnnnnnnnnnnnnnnnnnnnnnnnnnnnnnnnnnnnnnnnnnnnnnnnnnnnnnnnnnnnnnnnnnnnnnnnnnnnnnnnnnnnnnnnnnnnnnnnnnnnnnnnnnnnnnnnnnnnnnnnnnnnnnnnnnnnnnnnnnnnnnnnnnnnnnnnnnnnnnnnnnnnnnnnnnnnnnnnnnnnnnnnnnnnnnnnnnnnnnnnnnnnnnnnnnnnnnnnnnnnnnnnnnnnnnnnnnnnnnnnnnnnnnnnnnnnnnnnnnnnnnnnnnnnnnnnnnnnnnnnnnnnnnnnnnnnnnnnnnnnnnnnnnnnnnnnnnnnnnnnnnnnnnnnnnnnnnnnnnnnnnnnnnnnnnnnnnnnnnnnnnnnnnnnnnnnnnnnnnnnnnnnnnnnnnnnnnnnnnnnnnnnnnnnnnnnnnnnnnnnnnnnnnnnnnnnnnnnnnnnnnnnnnnnnnnnnnnnnnnnnnnnnnnnnnnnnnnnnnnnnnnnnnnnnnnnnnnnnnnnnnnnnnnnnnnnnnnnnnnnnnnnnnnnnnnnnnnnnnnnnnnnnnnnnnnnnnnnnnnnnnnnnnnnnnnnnnnnnnnnnnnnnnnnnnnnnnnnnnnnnnnnnnnnnnnnnnnnnnnnnnnnnnnnnnnnnnnnnnnnnnnnnnnnnnnnnnnnnnnnnnnnnnnnnnnnnnnnnnnnnnnnnnnnnnnnnnnnnnnnnnnnnnnnnnnnnnnnnnnnnnnnnnnnnnnnnnnnnnnnnnnnnnnnnnnnnnnnnnnnnnnnnnnnnnnnnnnnnnnnnnnnnnnnnnnnnnnnnnnnnnnnnnnnnnnnnnnnnnnnnnnnnnnnnnnnnnnnnnnnnnnnnnnnnnnnnnnnnnnnnnnnnnnnnnnnnnnnnnnnnnnnnnnnnnnnnnnnnnnnnnnnnnnnnnnnnnnnnnnnnnnnnnnnnnnnnnnnnnnnnnnnnnnnnnnnnnnnnnnnnnnnnnnnnnnnnnnnnnnnnnnnnnnnnnnnnnnnnnnnnnnnnnnnnnnnnnnnnnnnnnnnnnnnnnnnnnnnnnnnnnnnnnnnnnnnnnnnnnnnnnnnnnnnnnnnnnnnnnnnnnnnnnnnnnnnnnnnnnnnnnnnnnnnnnnnnnnnnnnnnnnnnnnnnnnnnnnnnnnnnnnnnnnnnnnnnnnnnnnnnnnnnnnnnnnnnnnnnnnnnnnnnnnnnnnnnnnnnnnnnnnnnnnnnnnnnnnnnnnnnnnnnnnnnnnnnnnnnnnnnnnnnnnnnnnnnnnnnnnnnnnnnnnnnnnnnnnnnnnnnnnnnnnnnnnnnnnnnnnnnnnnnnnnnnnnnnnnnnnnnnnnnnnnnnnnnnnnnnnnnnnnnnnnnnnnnnnnnnnnnnnnnnnnnnnnnnnnnnnnnnnnnnnnnnnnnnnnnnnnnnnnnnnnnnnnnnnnnnnnnnnnnnnnnnnnnnnnnnnnnnnnnnnnnnnnnnnnnnnnnnnnnnnnnnnnnnnnnnnnnnnnnnnnnnnnnnnnnnnnnnnnnnnnnnnnnnnnnnnnnnnnnnnnnnnnnnnnnnnnnnnnnnnnnnnnnnnnnnnnnnnnnnnnnnnnnnnnnnnnnnnnnnnnnnnnnnnnnnnnnnnnnnnnnnnnnnnnnnnnnnnnnnnnnnnnnnnnnnnnnnnnnnnnnnnnnnnnnnnnnnnnnnnnnnnnnnnnnnnnnnnnnnnnnnnnnnnnnnnnnnnnnnnnnnnnnnnnnnnnnnnnnnnnnnnnnnnnnnnnnnnnnnnnnnnnnnnnnnnnnnnnnnnnnnnnnnnnnnnnnnnnnnnnnnnnnnnnnnnnnnnnnnnnnnnnnnnnnnnnnnnnnnnnnnnnnnnnnnnnnnnnnnnnnnnnnnnnnnnnnnnnnnnnnnnnnnnnnnnnnnnnnnnnnnnnnnnnnnnnnnnnnnnnnnnnnnnnnnnnnnnnnnnnnnnnnnnnnnnnnnnnnnnnnnnnnnnnnnnnnnnnnnnnnnnnnnnnnnnnnnnnnnnnnnnnnnnnnnnnnnnnnnnnnnnnnnnnnnnnnnnnnnnnnnnnnnnnnnnnnnnnnnnnnnnnnnnnnnnnnnnnnnnnnnnnnnnnnnnnnnnnnnnnnnnnnnnnnnnnnnnnnnnnnnnnnnnnnnnnnnnnnnnnnnnnnnnnnnnnnnnnnnnnnnnnnnnnnnnnnnnnnnnnnnnnnnnnnnnnnnnnnnnnnnnnnnnnnnnnnnnnnnnnnnnnnnnnnnnnnnnnnnnnnnnnnnnnnnnnnnnnnnnnnnnnnnnnnnnnnnnnnnnnnnnnnnnnnnnnnnnnnnnnnnnnnnnnnnnnnnnnnnnnnnnnnnnnnnnnnnnnnnnnnnnnnnnnnnnnnnnnnnnnnnnnnnnnnnnnnnnnnnnnnnnnnnnnnnnnnnnnnnnnnnnnnnnnnnnnnnnnnnnnnnnnnnnnnnnnnnnnnnnnnnnnnnnnnnnnnnnnnnnnnnnnnnnnnnnnnnnnnnnnnnnnnnnnnnnnnnnnnnnnnnnnnnnnnnnnnnnnnnnnnnnnnnnnnnnnnnnnnnnnnnnnnnnnnnnnnnnnnnnnnnnnnnnnnnnnnnnnnnnnnnnnnnnnnnnnnnnnnnnnnnnnnnnnnnnnnnnnnnnnnnnnnnnnnnnnnnnnnnnnnnnnnnnnnnnnnnnnnnnnnnnnnnnnnnnnnnnnnnnnnnnnnnnnnnnnnnnnnnnnnnnnnnnnnnnnnnnnnnnnnnnnnnnnnnnnnnnnnnnnnnnnnnnnnnnnnnnnnnnnnnnnnnnnnnnnnnnnnnnnnnnnnnnnnnnnnnnnnnnnnnnnnnnnnnnnnnnnnnnnnnnnnnnnnnnnnnnnnnnnnnnnnnnnnnnnnnnnnnnnnnnnnnnnnnnnnnnnnnnnnnnnnnnnnnnnnnnnnnnnnnnnnnnnnnnnnnnnnnnnnnnnnnnnnnnnnnnnnnnnnnnnnnnnnnnnnnnnnnnnnnnnnnnnnnnnnnnnnnnnnnnnnnnnnnnnnnnnnnnnnnnnnnnnnnnnnnnnnnnnnnnnnnnnnnnnnnnnnnnnnnnnnnnnnnnnnnnnnnnnnnnnnnnnnnnnnnnnnnnnnnnnnnnnnnnnnnnnnnnnnnnnnnnnnnnnnnnnnnnnnnnnnnnnnnnnnnnnnnnnnnnnnnnnnnnnnnnnnnnnnnnnnnnnnnnnnnnnnnnnnnnnnnnnnnnnnnnnnnnnnnnnnnnnnnnnnnnnnnnnnnnnnnnnnnnnnnnnnnnnnnnnnnnnnnnnnnnnnnnnnnnnnnnnnnnnnnnnnnnnnnnnnnnnnnnnnnnnnnnnnnnnnnnnnnnnnnnnnnnnnnnnnnnnnnnnnnnnnnnnnnnnnnnnnnnnnnnnnnnnnnnnnnnnnnnnnnnnnnnnnnnnnnnnnnnnnnnnnnnnnnnnnnnnnnnnnnnnnnnnnnnnnnnnnnnnnnnnnnnnnnnnnnnnnnnnnnnnnnnnnnnnnnnnnnnnnnnnnnnnnnnnnnnnnnnnnnnnnnnnnnnnnnnnnnnnnnnnnnnnnnnnnnnnnnnnnnnnnnnnnnnnnnnnnnnnnnnnnnnnnnnnnnnnnnnnnnnnnnnnnnnnnnnnnnnnnnnnnnnnnnnnnnnnnnnnnnnnnnnnnnnnnnnnnnnnnnnnnnnnnnnnnnnnnnnnnnnnnnnnnnnnnnnnnnnnnnnnnnnnnnnnnnnnnnnnnnnnnnnnnnnnnnnnnnnnnnnnnnnnnnnnnnnnnnnnnnnnnnnnnnnnnnnnnnnnnnnnnnnnnnnnnnnnnnnnnnnnnnnnnnnnnnnnnnnnnnnnnnnnnnnnnnnnnnnnnnnnnnnnnnnnnnnnnnnnnnnnnnnnnnnnnnnnnnnnnnnnnnnnnnnnnnnnnnnnnnnnnnnnnnnnnnnnnnnnnnnnnnnnnnnnnnnnnnnnnnnnnnnnnnnnnnnnnnnnnnnnnnnnnnnnnnnnnnnnnnnnnnnnnnnnnnnnnnnnnnnnnnnnnnnnnnnnnnnnnnnnnnnnnnnnnnnnnnnnnnnnnnnnnnnnnnnnnnnnnnnnnnnnnnnnnnnnnnnnnnnnnnnnnnnnnnnnnnnnnnnnnnnnnnnnnnnnnnnnnnnnnnnnnnnnnnnnnnnnnnnnnnnnnnnnnnnnnnnnnnnnnnnnnnnnnnnnnnnnnnnnnnnnnnnnnnnnnnnnnnnnnnnnnnnnnnnnnnnnnnnnnnnnnnnnnnnnnnnnnnnnnnnnnnnnnnnnnnnnnnnnnnnnnnnnnnnnnnnnnnnnnnnnnnnnnnnnnnnnnnnnnnnnnnnnnnnnnnnnnnnnnnnnnnnnnnnnnnnnnnnnnnnnnnnnnnnnnnnnnnnnnnnnnnnnnnnnnnnnnnnnnnnnnnnnnnnnnnnnnnnnnnnnnnnnnnnnnnnnnnnnnnnnnnnnnnnnnnnnnnnnnnnnnnnnnnnnnnnnnnnnnnnnnnnnnnnnnnnnnnnnnnnnnnnnnnnnnnnnnnnnnnnnnnnnnnnnnnnnnnnnnnnnnnnnnnnnnnnnnnnnnnnnnnnnnnnnnnnnnnnnnnnnnnnnnnnnnnnnnnnnnnnnnnnnnnnnnnnnnnnnnnnnnnnnnnnnnnnnnnnnnnnnnnnnnnnnnnnnnnnnnnnnnnnnnnnnnnnnnnnnnnnnnnnnnnnnnnnnnnnnnnnnnnnnnnnnnnnnnnnnnnnnnnnnnnnnnnnnnnnnnnnnnnnnnnnnnnnnnnnnnnnnnnnnnnnnnnnnnnnnnnnnnnnnnnnnnnnnnnnnnnnnnnnnnnnnnnnnnnnnnnnnnnnnnnnnnnnnnnnnnnnnnnnnnnnnnnnnnnnnnnnnnnnnnnnnnnnnnnnnnnnnnnnnnnnnnnnnnnnnnnnnnnnnnnnnnnnnnnnnnnnnnnnnnnnnnnnnnnnnnnnnnnnnnnnnnnnnnnnnnnnnnnnnnnnnnnnnnnnnnnnnnnnnnnnnnnnnnnnnnnnnnnnnnnnnnnnnnnnnnnnnnnnnnnnnnnnnnnnnnnnnnnnnnnnnnnnnnnnnnnnnnnnnnnnnnnnnnnnnnnnnnnnnnnnnnnnnnnnnnnnnnnnnnnnnnnnnnnnnnnnnnnnnnnnnnnnnnnnnnnnnnnnnnnnnnnnnnnnnnnnnnnnnnnnnnnnnnnnnnnnnnnnnnnnnnnnnnnnnnnnnnnnnnnnnnnnnnnnnnnnnnnnnnnnnnnnnnnnnnnnnnnnnnnnnnnnnnnnnnnnnnnnnnnnnnnnnnnnnnnnnnnnnnnnnnnnnnnnnnnnnnnnnnnnnnnnnnnnnnnnnnnnnnnnnnnnnnnnnnnnnnnnnnnnnnnnnnnnnnnnnnnnnnnnnnnnnnnnnnnnnnnnnnnnnnnnnnnnnnnnnnnnnnnnnnnnnnnnnnnnnnnnnnnnnnnnnnnnnnnnnnnnnnnnnnnnnnnnnnnnnnnnnnnnnnnnnnnnnnnnnnnnnnnnnnnnnnnnnnnnnnnnnnnnnnnnnnnnnnnnnnnnnnnnnnnnnnnnnnnnnnnnnnnnnnnnnnnnnnnnnnnnnnnnnnnnnnnnnnnnnnnnnnnnnnnnnnnnnnnnnnnnnnnnnnnnnnnnnnnnnnnnnnnnnnnnnnnnnnnnnnnnnnnnnnnnnnnnnnnnnnnnnnnnnnnnnnnnnnnnnnnnnnnnnnnnnnnnnnnnnnnnnnnnnnnnnnnnnnnnnnnnnnnnnnnnnnnnnnnnnnnnnnnnnnnnnnnnnnnnnnnnnnnnnnnnnnnnnnnnnnnnnnnnnnnnnnnnnnnnnnnnnnnnnnnnnnnnnnnnnnnnnnnnnnnnnnnnnnnnnnnnnnnnnnnnnnnnnnnnnnnnnnnnnnnnnnnnnnnnnnnnnnnnnnnnnnnnnnnnnnnnnnnnnnnnnnnnnnnnnnnnnnnnnnnnnnnnnnnnnnnnnnnnnnnnnnnnnnnnnnnnnnnnnnnnnnnnnnnnnnnnnnnnnnnnnnnnnnnnnnnnnnnnnnnnnnnnnnnnnnnnnnnnnnnnnnnnnnnnnnnnnnnnnnnnnnnnnnnnnnnnnnnnnnnnnnnnnnnnnnnnnnnnnnnnnnnnnnnnnnnnnnnnnnnnnnnnnnnnnnnnnnnnnnnnnnnnnnnnnnnnnnnnnnnnnnnnnnnnnnnnnnnnnnnnnnnnnnnnnnnnnnnnnnnnnnnnnnnnnnnnnnnnnnnnnnnnnnnnnnnnnnnnnnnnnnnnnnnnnnnnnnnnnnnnnnnnnnnnnnnnnnnnnnnnnnnnnnnnnnnnnnnnnnnnnnnnnnnnnnnnnnnnnnnnnnnnnnnnnnnnnnnnnnnnnnnnnnnnnnnnnnnnnnnnnnnnnnnnnnnnnnnnnnnnnnnnnnnnnnnnnnnnnnnnnnnnnnnnnnnnnnnnnnnnnnnnnnnnnnnnnnnnnnnnnnnnnnnnnnnnnnnnnnnnnnnnnnnnnnnnnnnnnnnnnnnnnnnnnnnnnnnnnnnnnnnnnnnnnnnnnnnnnnnnnnnnnnnnnnnnnnnnnnnnnnnnnnnnnnnnnnnnnnnnnnnnnnnnnnnnnnnnnnnnnnnnnnnnnnnnnnnnnnnnnnnnnnnnnnnnnnnnnnnnnnnnnnnnnnnnnnnnnnnnnnnnnnnnnnnnnnnnnnnnnnnnnnnnnnnnnnnnnnnnnnnnnnnnnnnnnnnnnnnnnnnnnnnnnnnnnnnnnnnnnnnnnnnnnnnnnnnnnnnnnnnnnnnnnnnnnnnnnnnnnnnnnnnnnnnnnnnnnnnnnnnnnnnnnnnnnnnnnnnnnnnnnnnnnnnnnnnnnnnnnnnnnnnnnnnnnnnnnnnnnnnnnnnnnnnnnnnnnnnnnnnnnnnnnnnnnnnnnnnnnnnnnnnnnnnnnnnnnnnnnnnnnnnnnnnnnnnnnnnnnnnnnnnnnnnnnnnnnnnnnnnnnnnnnnnnnnnnnnnnnnnnnnnnnnnnnnnnnnnnnnnnnnnnnnnnnnnnnnnnnnnnnnnnnnnnnnnnnnnnnnnnnnnnnnnnnnnnnnnnnnnnnnnnnnnnnnnnnnnnnnnnnnnnnnnnnnnnnnnnnnnnnnnnnnnnnnnnnnnnnnnnnnnnnnnnnnnnnnnnnnnnnnnnnnnnnnnnnnnnnnnnnnnnnnnnnnnnnnnnnnnnnnnnnnnnnnnnnnnnnnnnnnnnnnnnnnnnnnnnnnnnnnnnnnnnnnnnnnnnnnnnnnnnnnnnnnnnnnnnnnnnnnnnnnnnnnnnnnnnnnnnnnnnnnnnnnnnnnnnnnnnnnnnnnnnnnnnnnnnnnnnnnnnnnnnnnnnnnnnnnnnnnnnnnnnnnnnnnnnnnnnnnnnnnnnnnnnnnnnnnnnnnnnnnnnnnnnnnnnnnnnnnnnnnnnnnnnnnnnnnnnnnnnnnnnnnnnnnnnnnnnnnnnnnnnnnnnnnnnnnnnnnnnnnnnnnnnnnnnnnnnnnnnnnnnnnnnnnnnnnnnnnnnnnnnnnnnnnnnnnnnnnnnnnnnnnnnnnnnnnnnnnnnnnnnnnnnnnnnnnnnnnnnnnnnnnnnnnnnnnnnnnnnnnnnnnnnnnnnnnnnnnnnnnnnnnnnnnnnnnnnnnnnnnnnnnnnnnnnnnnnnnnnnnnnnnnnnnnnnnnnnnnnnnnnnnnnnnnnnnnnnnnnnnnnnnnnnnnnnnnnnnnnnnnnnnnnnnnnnnnnnnnnnnnnnnnnnnnnnnnnnnnnnnnnnnnnnnnnnnnnnnnnnnnnnnnnnnnnnnnnnnnnnnnnnnnnnnnnnnnnnnnnnnnnnnnnnnnnnnnnnnnnnnnnnnnnnnnnnnnnnnnnnnnnnnnnnnnnnnnnnnnnnnnnnnnnnnnnnnnnnnnnnnnnnnnnnnnnnnnnnnnnnnnnnnnnnnnnnnnnnnnnnnnnnnnnnnnnnnnnnnnnnnnnnnnnnnnnnnnnnnnnnnnnnnnnnnnnnnnnnnnnnnnnnnnnnnnnnnnnnnnnnnnnnnnnnnnnnnnnnnnnnnnnnnnnnnnnnnnnnnnnnnnnnnnnnnnnnnnnnnnnnnnnnnnnnnnnnnnnnnnnnnnnnnnnnnnnnnnnnnnnnnnnnnnnnnnnnnnnnnnnnnnnnnnnnnnnnnnnnnnnnnnnnnnnnnnnnnnnnnnnnnnnnnnnnnnnnnnnnnnnnnnnnnnnnnnnnnnnnnnnnnnnnnnnnnnnnnnnnnnnnnnnnnnnnnnnnnnnnnnnnnnnnnnnnnnnnnnnnnnnnnnnnnnnnnnnnnnnnnnnnnnnnnnnnnnnnnnnnnnnnnnnnnnnnnnnnnnnnnnnnnnnnnnnnnnnnnnnnnnnnnnnnnnnnnnnnnnnnnnnnnnnnnnnnnnnnnnnnnnnnnnnnnnnnnnnnnnnnnnnnnnnnnnnnnnnnnnnnnnnnnnnnnnnnnnnnnnnnnnnnnnnnnnnnnnnnnnnnnnnnnnnnnnnnnnnnnnnnnnnnnnnnnnnnnnnnnnnnnnnnnnnnnnnnnnnnnnnnnnnnnnnnnnnnnnnnnnnnnnnnnnnnnnnnnnnnnnnnnnnnnnnnnnnnnnnnnnnnnnnnnnnnnnnnnnnnnnnnnnnnnnnnnnnnnnnnnnnnnnnnnnnnnnnnnnnnnnnnnnnnnnnnnnnnnnnnnnnnnnnnnnnnnnnnnnnnnnnnnnnnnnnnnnnnnnnnnnnnnnnnnnnnnnnnnnnnnnnnnnnnnnnnnnnnnnnnnnnnnnnnnnnnnnnnnnnnnnnnnnnnnnnnnnnnnnnnnnnnnnnnnnnnnnnnnnnnnnnnnnnnnnnnnnnnnnnnnnnnnnnnnnnnnnnnnnnnnnnnnnnnnnnnnnnnnnnnnnnnnnnnnnnnnnnnnnnnnnnnnnnnnnnnnnnnnnnnnnnnnnnnnnnnnnnnnnnnnnnnnnnnnnnnnnnnnnnnnnnnnnnnnnnnnnnnnnnnnnnnnnnnnnnnnnnnnnnnnnnnnnnnnnnnnnnnnnnnnnnnnnnnnnnnnnnnnnnnnnnnnnnnnnnnnnnnnnnnnnnnnnnnnnnnnnnnnnnnnnnnnnnnnnnnnnnnnnnnnnnnnnnnnnnnnnnnnnnnnnnnnnnnnnnnnnnnnnnnnnnnnnnnnnnnnnnnnnnnnnnnnnnnnnnnnnnnnnnnnnnnnnnnnnnnnnnnnnnnnnnnnnnnnnnnnnnnnnnnnnnnnnnnnnnnnnnnnnnnnnnnnnnnnnnnnnnnnnnnnnnnnnnnnnnnnnnnnnnnnnnnnnnnnnnnnnnnnnnnnnnnnnnnnnnnnnnnnnnnnnnnnnnnnnnnnnnnnnnnnnnnnnnnnnnnnnnnnnnnnnnnnnnnnnnnnnnnnnnnnnnnnnnnnnnnnnnnnnnnnnnnnnnnnnnnnnnnnnnnnnnnnnnnnnnnnnnnnnnnnnnnnnnnnnnnnnnnnnnnnnnnnnnnnnnnnnnnnnnnnnnnnnnnnnnnnnnnnnnnnnnnnnnnnnnnnnnnnnnnnnnnnnnnnnnnnnnnnnnnnnnnnnnnnnnnnnnnnnnnnnnnnnnnnnnnnnnnnnnnnnnnnnnnnnnnnnnnnnnnnnnnnnnnnnnnnnnnnnnnnnnnnnnnnnnnnnnnnnnnnnnnnnnnnnnnnnnnnnnnnnnnnnnnnnnnnnnnnnnnnnnnnnnnnnnnnnnnnnnnnnnnnnnnnnnnnnnnnnnnnnnnnnnnnnnnnnnnnnnnnnnnnnnnnnnnnnnnnnnnnnnnnnnnnnnnnnnnnnnnnnnnnnnnnnnnnnnnnnnnnnnnnnnnnnnnnnnnnnnnnnnnnnnnnnnnnnnnnnnnnnnnnnnnnnnnnnnnnnnnnnnnnnnnnnnnnnnnnnnnnnnnnnnnnnnnnnnnnnnnnnnnnnnnnnnnnnnnnnnnnnnnnnnnnnnnnnnnnnnnnnnnnnnnnnnnnnnnnnnnnnnnnnnnnnnnnnnnnnnnnnnnnnnnnnnnnnnnnnnnnnnnnnnnnnnnnnnnnnnnnnnnnnnnnnnnnnnnnnnnnnnnnnnnnnnnnnnnnnnnnnnnnnnnnnnnnnnnnnnnnnnnnnnnnnnnnnnnnnnnnnnnnnnnnnnnnnnnnnnnnnnnnnnnnnnnnnnnnnnnnnnnnnnnnnnnnnnnnnnnnnnnnnnnnnnnnnnnnnnnnnnnnnnnnnnnnnnnnnnnnnnnnnnnnnnnnnnnnnnnnnnnnnnnnnnnnnnnnnnnnnnnnnnnnnnnnnnnnnnnnnnnnnnnnnnnnnnnnnnnnnnnnnnnnnnnnnnnnnnnnnnnnnnnnnnnnnnnnnnnnnnnnnnnnnnnnnnnnnnnnnnnnnnnnnnnnnnnnnnnnnnnnnnnnnnnnnnnnnnnnnnnnnnnnnnnnnnnnnnnnnnnnnnnnnnnnnnnnnnnnnnnnnnnnnnnnnnnnnnnnnnnnnnnnnnnnnnnnnnnnnnnnnnnnnnnnnnnnnnnnnnnnnnnnnnnnnnnnnnnnnnnnnnnnnnnnnnnnnnnnnnnnnnnnnnnnnnnnnnnnnnnnnnnnnnnnnnnnnnnnnnnnnnnnnnnnnnnnnnnnnnnnnnnnnnnnnnnnnnnnnnnnnnnnnnnnnnnnnnnnnnnnnnnnnnnnnnnnnnnnnnnnnnnnnnnnnnnnnnnnnnnnnnnnnnnnnnnnnnnnnnnnnnnnnnnnnnnnnnnnnnnnnnnnnnnnnnnnnnnnnnnnnnnnnnnnnnnnnnnnnnnnnnnnnnnnnnnnnnnnnnnnnnnnnnnnnnnnnnnnnnnnnnnnnnnnnnnnnnnnnnnnnnnnnnnnnnnnnnnnnnnnnnnnnnnnnnnnnnnnnnnnnnnnnnnnnnnnnnnnnnnnnnnnnnnnnnnnnnnnnnnnnnnnnnnnnnnnnnnnnnnnnnnnnnnnnnnnnnnnnnnnnnnnnnnnnnnnnnnnnnnnnnnnnnnnnnnnnnnnnnnnnnnnnnnnnnnnnnnnnnnnnnnnnnnnnnnnnnnnnnnnnnnnnnnnnnnnnnnnnnnnnnnnnnnnnnnnnnnnnnnnnnnnnnnnnnnnnnnnnnnnnnnnnnnnnnnnnnnnnnnnnnnnnnnnnnnnnnnnnnnnnnnnnnnnnnnnnnnnnnnnnnnnnnnnnnnnnnnnnnnnnnnnnnnnnnnnnnnnnnnnnnnnnnnnnnnnnnnnnnnnnnnnnnnnnnnnnnnnnnnnnnnnnnnnnnnnnnnnnnnnnnnnnnnnnnnnnnnnnnnnnnnnnnnnnnnnnnnnnnnnnnnnnnnnnnnnnnnnnnnnnnnnnnnnnnnnnnnnnnnnnnnnnnnnnnnnnnnnnnnnnnnnnnnnnnnnnnnnnnnnnnnnnnnnnnnnnnnnnnnnnnnnnnnnnnnnnnnnnnnnnnnnnnnnnnnnnnnnnnnnnnnnnnnnnnnnnnnnnnnnnnnnnnnnnnnnnnnnnnnnnnnnnnnnnnnnnnnnnnnnnnnnnnnnnnnnnnnnnnnnnnnnnnnnnnnnnnnnnnnnnnnnnnnnnnnnnnnnnnnnnnnnnnnnnnnnnnnnnnnnnnnnnnnnnnnnnnnnnnnnnnnnnnnnnnnnnnnnnnnnnnnnnnnnnnnnnnnnnnnnnnnnnnnnnnnnnnnnnnnnnnnnnnnnnnnnnnnnnnnnnnnnnnnnnnnnnnnnnnnnnnnnnnnnnnnnnnnnnnnnnnnnnnnnnnnnnnnnnnnnnnnnnnnnnnnnnnnnnnnnnnnnnnnnnnnnnnnnnnnnnnnnnnnnnnnnnnnnnnnnnnnnnnnnnnnnnnnnnnnnnnnnnnnnnnnnnnnnnnnnnnnnnnnnnnnnnnnnnnnnnnnnnnnnnnnnnnnnnnnnnnnnnnnnnnnnnnnnnnnnnnnnnnnnnnnnnnnnnnnnnnnnnnnnnnnnnnnnnnnnnnnnnnnnnnnnnnnnnnnnnnnnnnnnnnnnnnnnnnnnnnnnnnnnnnnnnnnnnnnnnnnnnnnnnnnnnnnnnnnnnnnnnnnnnnnnnnnnnnnnnnnnnnnnnnnnnnnnnnnnnnnnnnnnnnnnnnnnnnnnnnnnnnnnnnnnnnnnnnnnnnnnnnnnnnnnnnnnnnnnnnnnnnnnnnnnnnnnnnnnnnnnnnnnnnnnnnnnnnnnnnnnnnnnnnnnnnnnnnnnnnnnnnnnnnnnnnnnnnnnnnnnnnnnnnnnnnnnnnnnnnnnnnnnnnnnnnnnnnnnnnnnnnnnnnnnnnnnnnnnnnnnnnnnnnnnnnnnnnnnnnnnnnnnnnnnnnnnnnnnnnnnnnnnnnnnnnnnnnnnnnnnnnnnnnnnnnnnnnnnnnnnnnnnnnnnnnnnnnnnnnnnnnnnnnnnnnnnnnnnnnnnnnnnnnnnnnnnnnnnnnnnnnnnnnnnnnnnnnnnnnnnnnnnnnnnnnnnnnnnnnnnnnnnnnnnnnnnnnnnnnnnnnnnnnnnnnnnnnnnnnnnnnnnnnnnnnnnnnnnnnnnnnnnnnnnnnnnnnnnnnnnnnnnnnnnnnnnnnnnnnnnnnnnnnnnnnnnnnnnnnnnnnnnnnnnnnnnnnnnnnnnnnnnnnnnnnnnnnnnnnnnnnnnnnnnnnnnnnnnnnnnnnnnnnnnnnnnnnnnnnnnnnnnnnnnnnnnnnnnnnnnnnnnnnnnnnnnnnnnnnnnnnnnnnnnnnnnnnnnnnnnnnnnnnnnnnnnnnnnnnnnnnnnnnnnnnnnnnnnnnnnnnnnnnnnnnnnnnnnnnnnnnnnnnnnnnnnnnnnnnnnnnnnnnnnnnnnnnnnnnnnnnnnnnnnnnnnnnnnnnnnnnnnnnnnnnnnnnnnnnnnnnnnnnnnnnnnnnnnnnnnnnnnnnnnnnnnnnnnnnnnnnnnnnnnnnnnnnnnnnnnnnnnnnnnnnnnnnnnnnnnnnnnnnnnnnnnnnnnnnnnnnnnnnnnnnnnnnnnnnnnnnnnnnnnnnnnnnnnnnnnnnnnnnnnnnnnnnnnnnnnnnnnnnnnnnnnnnnnnnnnnnnnnnnnnnnnnnnnnnnnnnnnnnnnnnnnnnnnnnnnnnnnnnnnnnnnnnnnnnnnnnnnnnnnnnnnnnnnnnnnnnnnnnnnnnnnnnnnnnnnnnnnnnnnnnnnnnnnnnnnnnnnnnnnnnnnnnnnnnnnnnnnnnnnnnnnnnnnnnnnnnnnnnnnnnnnnnnnnnnnnnnnnnnnnnnnnnnnnnnnnnnnnnnnnnnnnnnnnnnnnnnnnnnnnnnnnnnnnnnnnnnnnnnnnnnnnnnnnnnnnnnnnnnnnnnnnnnnnnnnnnnnnnnnnnnnnnnnnnnnnnnnnnnnnnnnnnnnnnnnnnnnnnnnnnnnnnnnnnnnnnnnnnnnnnnnnnnnnnnnnnnnnnnnnnnnnnnnnnnnnnnnnnnnnnnnnnnnnnnnnnnnnnnnnnnnnnnnnnnnnnnnnnnnnnnnnnnnnnnnnnnnnnnnnnnnnnnnnnnnnnnnnnnnnnnnnnnnnnnnnnnnnnnnnnnnnnnnnnnnnnnnnnnnnnnnnnnnnnnnnnnnnnnnnnnnnnnnnnnnnnnnnnnnnnnnnnnnnnnnnnnnnnnnnnnnnnnnnnnnnnnnnnnnnnnnnnnnnnnnnnnnnnnnnnnnnnnnnnnnnnnnnnnnnnnnnnnnnnnnnnnnnnnnnnnnnnnnnnnnnnnnnnnnnnnnnnnnnnnnnnnnnnnnnnnnnnnnnnnnnnnnnnnnnnnnnnnnnnnnnnnnnnnnnnnnnnnnnnnnnnnnnnnnnnnnnnnnnnnnnnnnnnnnnnnnnnnnnnnnnnnnnnnnnnnnnnnnnnnnnnnnnnnnnnnnnnnnnnnnnnnnnnnnnnnnnnnnnnnnnnnnnnnnnnnnnnnnnnnnnnnnnnnnnnnnnnnnnnnnnnnnnnnnnnnnnnnnnnnnnnnnnnnnnnnnnnnnnnnnnnnnnnnnnnnnnnnnnnnnnnnnnnnnnnnnnnnnnnnnnnnnnnnnnnnnnnnnnnnnnnnnnnnnnnnnnnnnnnnnnnnnnnnnnnnnnnnnnnnnnnnnnnnnnnnnnnnnnnnnnnnnnnnnnnnnnnnnnnnnnnnnnnnnnnnnnnnnnnnnnnnnnnnnnnnnnnnnnnnnnnnnnnnnnnnnnnnnnnnnnnnnnnnnnnnnnnnnnnnnnnnnnnnnnnnnnnnnnnnnnnnnnnnnnnnnnnnnnnnnnnnnnnnnnnnnnnnnnnnnnnnnnnnnnnnnnnnnnnnnnnnnnnnnnnnnnnnnnnnnnnnnnnnnnnnnnnnnnnnnnnnnnnnnnnnnnnnnnnnnnnnnnnnnnnnnnnnnnnnnnnnnnnnnnnnnnnnnnnnnnnnnnnnnnnnnnnnnnnnnnnnnnnnnnnnnnnnnnnnnnnnnnnnnnnnnnnnnnnnnnnnnnnnnnnnnnnnnnnnnnnnnnnnnnnnnnnnnnnnnnnnnnnnnnnnnnnnnnnnnnnnnnnnnnnnnnnnnnnnnnnnnnnnnnnnnnnnnnnnnnnnnnnnnnnnnnnnnnnnnnnnnnnnnnnnnnnnnnnnnnnnnnnnnnnnnnnnnnnnnnnnnnnnnnnnnnnnnnnnnnnnnnnnnnnnnnnnnnnnnnnnnnnnnnnnnnnnnnnnnnnnnnnnnnnnnnnnnnnnnnnnnnnnnnnnnnnnnnnnnnnnnnnnnnnnnnnnnnnnnnnnnnnnnnnnnnnnnnnnnnnnnnnnnnnnnnnnnnnnnnnnnnnnnnnnnnnnnnnnnnnnnnnnnnnnnnnnnnnnnnnnnnnnnnnnnnnnnnnnnnnnnnnnnnnnnnnnnnnnnnnnnnnnnnnnnnnnnnnnnnnnnnnnnnnnnnnnnnnnnnnnnnnnnnnnnnnnnnnnnnnnnnnnnnnnnnnnnnnnnnnnnnnnnnnnnnnnnnnnnnnnnnnnnnnnnnnnnnnnnnnnnnnnnnnnnnnnnnnnnnnnnnnnnnnnnnnnnnnnnnnnnnnnnnnnnnnnnnnnnnnnnnnnnnnnnnnnnnnnnnnnnnnnnnnnnnnnnnnnnnnnnnnnnnnnnnnnnnnnnnnnnnnnnnnnnnnnnnnnnnnnnnnnnnnnnnnnnnnnnnnnnnnnnnnnnnnnnnnnnnnnnnnnnnnnnnnnnnnnnnnnnnnnnnnnnnnnnnnnnnnnnnnnnnnnnnnnnnnnnnnnnnnnnnnnnnnnnnnnnnnnnnnnnnnnnnnnnnnnnnnnnnnnnnnnnnnnnnnnnnnnnnnnnnnnnnnnnnnnnnnnnnnnnnnnnnnnnnnnnnnnnnnnnnnnnnnnnnnnnnnnnnnnnnnnnnnnnnnnnnnnnnnnnnnnnnnnnnnnnnnnnnnnnnnnnnnnnnnnnnnnnnnnnnnnnnnnnnnnnnnnnnnnnnnnnnnnnnnnnnnnnnnnnnnnnnnnnnnnnnnnnnnnnnnnnnnnnnnnnnnnnnnnnnnnnnnnnnnnnnnnnnnnnnnnnnnnnnnnnnnnnnnnnnnnnnnnnnnnnnnnnnnnnnnnnnnnnnnnnnnnnnnnnnnnnnnnnnnnnnnnnnnnnnnnnnnnnnnnnnnnnnnnnnnnnnnnnnnnnnnnnnnnnnnnnnnnnnnnnnnnnnnnnnnnnnnnnnnnnnnnnnnnnnnnnnnnnnnnnnnnnnnnnnnnnnnnnnnnnnnnnnnnnnnnnnnnnnnnnnnnnnnnnnnnnnnnnnnnnnnnnnnnnnnnnnnnnnnnnnnnnnnnnnnnnnnnnnnnnnnnnnnnnnnnnnnnnnnnnnnnnnnnnnnnnnnnnnnnnnnnnnnnnnnnnnnnnnnnnnnnnnnnnnnnnnnnnnnnnnnnnnnnnnnnnnnnnnnnnnnnnnnnnnnnnnnnnnnnnnnnnnnnnnnnnnnnnnnnnnnnnnnnnnnnnnnnnnnnnnnnnnnnnnnnnnnnnnnnnnnnnnnnnnnnnnnnnnnnnnnnnnnnnnnnnnnnnnnnnnnnnnnnnnnnnnnnnnnnnnnnnnnnnnnnnnnnnnnnnnnnnnnnnnnnnnnnnnnnnnnnnnnnnnnnnnnnnnnnnnnnnnnnnnnnnnnnnnnnnnnnnnnnnnnnnnnnnnnnnnnnnnnnnnnnnnnnnnnnnnnnnnnnnnnnnnnnnnnnnnnnnnnnnnnnnnnnnnnnnnnnnnnnnnnnnnnnnnnnnnnnnnnnnnnnnnnnnnnnnnnnnnnnnnnnnnnnnnnnnnnnnnnnnnnnnnnnnnnnnnnnnnnnnnnnnnnnnnnnnnnnnnnnnnnnnnnnnnnnnnnnnnnnnnnnnnnnnnnnnnnnnnnnnnnnnnnnnnnnnnnnnnnnnnnnnnnnnnnnnnnnnnnnnnnnnnnnnnnnnnnnnnnnnnnnnnnnnnnnnnnnnnnnnnnnnnnnnnnnnnnnnnnnnnnnnnnnnnnnnnnnnnnnnnnnnnnnnnnnnnnnnnnnnnnnnnnnnnnnnnnnnnnnnnnnnnnnnnnnnnnnnnnnnnnnnnnnnnnnnnnnnnnnnnnnnnnnnnnnnnnnnnnnnnnnnnnnnnnnnnnnnnnnnnnnnnnnnnnnnnnnnnnnnnnnnnnnnnnnnnnnnnnnnnnnnnnnnnnnnnnnnnnnnnnnnnnnnnnnnnnnnnnnnnnnnnnnnnnnnnnnnnnnnnnnnnnnnnnnnnnnnnnnnnnnnnnnnnnnnnnnnnnnnnnnnnnnnnnnnnnnnnnnnnnnnnnnnnnnnnnnnnnnnnnnnnnnnnnnnnnnnnnnnnnnnnnnnnnnnnnnnnnnnnnnnnnnnnnnnnnnnnnnnnnnnnnnnnnnnnnnnnnnnnnnnnnnnnnnnnnnnnnnnnnnnnnnnnnnnnnnnnnnnnnnnnnnnnnnnnnnnnnnnnnnnnnnnnnnnnnnnnnnnnnnnnnnnnnnnnnnnnnnnnnnnnnnnnnnnnnnnnnnnnnnnnnnnnnnnnnnnnnnnnnnnnnnnnnnnnnnnnnnnnnnnnnnnnnnnnnnnnnnnnnnnnnnnnnnnnnnnnnnnnnnnnnnnnnnnnnnnnnnnnnnnnnnnnnnnnnnnnnnnnnnnnnnnnnnnnnnnnnnnnnnnnnnnnnnnnnnnnnnnnnnnnnnnnnnnnnnnnnnnnnnnnnnnnnnnnnnnnnnnnnnnnnnnnnnnnnnnnnnnnnnnnnnnnnnnnnnnnnnnnnnnnnnnnnnnnnnnnnnnnnnnnnnnnnnnnnnnnnnnnnnnnnnnnnnnnnnnnnnnnnnnnnnnnnnnnnnnnnnnnnnnnnnnnnnnnnnnnnnnnnnnnnnnnnnnnnnnnnnnnnnnnnnnnnnnnnnnnnnnnnnnnnnnnnnnnnnnnnnnnnnnnnnnnnnnnnnnnnnnnnnnnnnnnnnnnnnnnnnnnnnnnnnnnnnnnnnnnnnnnnnnnnnnnnnnnnnnnnnnnnnnnnnnnnnnnnnnnnnnnnnnnnnnnnnnnnnnnnnnnnnnnnnnnnnnnnnnnnnnnnnnnnnnnnnnnnnnnnnnnnnnnnnnnnnnnnnnnnnnnnnnnnnnnnnnnnnnnnnnnnnnnnnnnnnnnnnnnnnnnnnnnnnnnnnnnnnnnnnnnnnnnnnnnnnnnnnnnnnnnnnnnnnnnnnnnnnnnnnnnnnnnnnnnnnnnnnnnnnnnnnnnnnnnnnnnnnnnnnnnnnnnnnnnnnnnnnnnnnnnnnnnnnnnnnnnnnnnnnnnnnnnnnnnnnnnnnnnnnnnnnnnnnnnnnnnnnnnnnnnnnnnnnnnnnnnnnnnnnnnnnnnnnnnnnnnnnnnnnnnnnnnnnnnnnnnnnnnnnnnnnnnnnnnnnnnnnnnnnnnnnnnnnnnnnnnnnnnnnnnnnnnnnnnnnnnnnnnnnnnnnnnnnnnnnnnnnnnnnnnnnnnnnnnnnnnnnnnnnnnnnnnnnnnnnnnnnnnnnnnnnnnnnnnnnnnnnnnnnnnnnnnnnnnnnnnnnnnnnnnnnnnnnnnnnnnnnnnnnnnnnnnnnnnnnnnnnnnnnnnnnnnnnnnnnnnnnnnnnnnnnnnnnnnnnnnnnnnnnnnnnnnnnnnnnnnnnnnnnnnnnnnnnnnnnnnnnnnnnnnnnnnnnnnnnnnnnnnnnnnnnnnnnnnnnnnnnnnnnnnnnnnnnnnnnnnnnnnnnnnnnnnnnnnnnnnnnnnnnnnnnnnnnnnnnnnnnnnnnnnnnnnnnnnnnnnnnnnnnnnnnnnnnnnnnnnnnnnnnnnnnnnnnnnnnnnnnnnnnnnnnnnnnnnnnnnnnnnnnnnnnnnnnnnnnnnnnnnnnnnnnnnnnnnnnnnnnnnnnnnnnnnnnnnnnnnnnnnnnnnnnnnnnnnnnnnnnnnnnnnnnnnnnnnnnnnnnnnnnnnnnnnnnnnnnnnnnnnnnnnnnnnnnnnnnnnnnnnnnnnnnnnnnnnnnnnnnnnnnnnnnnnnnnnnnnnnnnnnnnnnnnnnnnnnnnnnnnnnnnnnnnnnnnnnnnnnnnnnnnnnnnnnnnnnnnnnnnnnnnnnnnnnnnnnnnnnnnnnnnnnnnnnnnnnnnnnnnnnnnnnnnnnnnnnnnnnnnnnnnnnnnnnnnnnnnnnnnnnnnnnnnnnnnnnnnnnnnnnnnnnnnnnnnnnnnnnnnnnnnnnnnnnnnnnnnnnnnnnnnnnnnnnnnnnnnnnnnnnnnnnnnnnnnnnnnnnnnnnnnnnnnnnnnnnnnnnnnnnnnnnnnnnnnnnnnnnnnnnnnnnnnnnnnnnnnnnnnnnnnnnnnnnnnnnnnnnnnnnnnnnnnnnnnnnnnnnnnnnnnnnnnnnnnnnnnnnnnnnnnnnnnnnnnnnnnnnnnnnnnnnnnnnnnnnnnnnnnnnnnnnnnnnnnnnnnnnnnnnnnnnnnnnnnnnnnnnnnnnnnnnnnnnnnnnnnnnnnnnnnnnnnnnnnnnnnnnnnnnnnnnnnnnnnnnnnnnnnnnnnnnnnnnnnnnnnnnnnnnnnnnnnnnnnnnnnnnnnnnnnnnnnnnnnnnnnnnnnnnnnnnnnnnnnnnnnnnnnnnnnnnnnnnnnnnnnnnnnnnnnnnnnnnnnnnnnnnnnnnnnnnnnnnnnnnnnnnnnnnnnnnnnnnnnnnnnnnnnnnnnnnnnnnnnnnnnnnnnnnnnnnnnnnnnnnnnnnnnnnnnnnnnnnnnnnnnnnnnnnnnnnnnnnnnnnnnnnnnnnnnnnnnnnnnnnnnnnnnnnnnnnnnnnnnnnnnnnnnnnnnnnnnnnnnnnnnnnnnnnnnnnnnnnnnnnnnnnnnnnnnnnnnnnnnnnnnnnnnnnnnnnnnnnnnnnnnnnnnnnnnnnnnnnnnnnnnnnnnnnnnnnnnnnnnnnnnnnnnnnnnnnnnnnnnnnnnnnnnnnnnnnnnnnnnnnnnnnnnnnnnnnnnnnnnnnnnnnnnnnnnnnnnnnnnnnnnnnnnnnnnnnnnnnnnnnnnnnnnnnnnnnnnnnnnnnnnnnnnnnnnnnnnnnnnnnnnnnnnnnnnnnnnnnnnnnnnnnnnnnnnnnnnnnnnnnnnnnnnnnnnnnnnnnnnnnnnnnnnnnnnnnnnnnnnnnnnnnnnnnnnnnnnnnnnnnnnnnnnnnnnnnnnnnnnnnnnnnnnnnnnnnnnnnnnnnnnnnnnnnnnnnnnnnnnnnnnnnnnnnnnnnnnnnnnnnnnnnnnnnnnnnnnnnnnnnnnnnnnnnnnnnnnnnnnnnnnnnnnnnnnnnnnnnnnnnnnnnnnnnnnnnnnnnnnnnnnnnnnnnnnnnnnnnnnnnnnnnnnnnnnnnnnnnnnnnnnnnnnnnnnnnnnnnnnnnnnnnnnnnnnnnnnnnnnnnnnnnnnnnnnnnnnnnnnnnnnnnnnnnnnnnnnnnnnnnnnnnnnnnnnnnnnnnnnnnnnnnnnnnnnnnnnnnnnnnnnnnnnnnnnnnnnnnnnnnnnnnnnnnnnnnnnnnnnnnnnnnnnnnnnnnnnnnnnnnnnnnnnnnnnnnnnnnnnnnnnnnnnnnnnnnnnnnnnnnnnnnnnnnnnnnnnnnnnnnnnnnnnnnnnnnnnnnnnnnnnnnnnnnnnnnnnnnnnnnnnnnnnnnnnnnnnnnnnnnnnnnnnnnnnnnnnnnnnnnnnnnnnnnnnnnnnnnnnnnnnnnnnnnnnnnnnnnnnnnnnnnnnnnnnnnnnnnnnnnnnnnnnnnnnnnnnnnnnnnnnnnnnnnnnnnnnnnnnnnnnnnnnnnnnnnnnnnnnnnnnnnnnnnnnnnnnnnnnnnnnnnnnnnnnnnnnnnnnnnnnnnnnnnnnnnnnnnnnnnnnnnnnnnnnnnnnnnnnnnnnnnnnnnnnnnnnnnnnnnnnnnnnnnnnnnnnnnnnnnnnnnnnnnnnnnnnnnnnnnnnnnnnnnnnnnnnnnnnnnnnnnnnnnnnnnnnnnnnnnnnnnnnnnnnnnnnnnnnnnnnnnnnnnnnnnnnnnnnnnnnnnnnnnnnnnnnnnnnnnnnnnnnnnnnnnnnnnnnnnnnnnnnnnnnnnnnnnnnnnnnnnnnnnnnnnnnnnnnnnnnnnnnnnnnnnnnnnnnnnnnnnnnnnnnnnnnnnnnnnnnnnnnnnnnnnnnnnnnnnnnnnnnnnnnnnnnnnnnnnnnnnnnnnnnnnnnnnnnnnnnnnnnnnnnnnnnnnnnnnnnnnnnnnnnnnnnnnnnnnnnnnnnnnnnnnnnnnnnnnnnnnnnnnnnnnnnnnnnnnnnnnnnnnnnnnnnnnnnnnnnnnnnnnnnnnnnnnnnnnnnnnnnnnnnnnnnnnnnnnnnnnnnnnnnnnnnnnnnnnnnnnnnnnnnnnnnnnnnnnnnnnnnnnnnnnnnnnnnnnnnnnnnnnnnnnnnnnnnnnnnnnnnnnnnnnnnnnnnnnnnnnnnnnnnnnnnnnnnnnnnnnnnnnnnnnnnnnnnnnnnnnnnnnnnnnnnnnnnnnnnnnnnnnnnnnnnnnnnnnnnnnnnnnnnnnnnnnnnnnnnnnnnnnnnnnnnnnnnnnnnnnnnnnnnnnnnnnnnnnnnnnnnnnnnnnnnnnnnnnnnnnnnnnnnnnnnnnnnnnnnnnnnnnnnnnnnnnnnnnnnnnnnnnnnnnnnnnnnnnnnnnnnnnnnnnnnnnnnnnnnnnnnnnnnnnnnnnnnnnnnnnnnnnnnnnnnnnnnnnnnnnnnnnnnnnnnnnnnnnnnnnnnnnnnnnnnnnnnnnnnnnnnnnnnnnnnnnnnnnnnnnnnnnnnnnnnnnnnnnnnnnnnnnnnnnnnnnnnnnnnnnnnnnnnnnnnnnnnnnnnnnnnnnnnnnnnnnnnnnnnnnnnnnnnnnnnnnnnnnnnnnnnnnnnnnnnnnnnnnnnnnnnnnnnnnnnnnnnnnnnnnnnnnnnnnnnnnnnnnnnnnnnnnnnnnnnnnnnnnnnnnnnnnnnnnnnnnnnnnnnnnnnnnnnnnnnnnnnnnnnnnnnnnnnnnnnnnnnnnnnnnnnnnnnnnnnnnnnnnnnnnnnnnnnnnnnnnnnnnnnnnnnnnnnnnnnnnnnnnnnnnnnnnnnnnnnnnnnnnnnnnnnnnnnnnnnnnnnnnnnnnnnnnnnnnnnnnnnnnnnnnnnnnnnnnnnnnnnnnnnnnnnnnnnnnnnnnnnnnnnnnnnnnnnnnnnnnnnnnnnnnnnnnnnnnnnnnnnnnnnnnnnnnnnnnnnnnnnnnnnnnnnnnnnnnnnnnnnnnnnnnnnnnnnnnnnnnnnnnnnnnnnnnnnnnnnnnnnnnnnnnnnnnnnnnnnnnnnnnnnnnnnnnnnnnnnnnnnnnnnnnnnnnnnnnnnnnnnnnnnnnnnnnnnnnnnnnnnnnnnnnnnnnnnnnnnnnnnnnnnnnnnnnnnnnnnnnnnnnnnnnnnnnnnnnnnnnnnnnnnnnnnnnnnnnnnnnnnnnnnnnnnnnnnnnnnnnnnnnnnnnnnnnnnnnnnnnnnnnnnnnnnnnnnnnnnnnnnnnnnnnnnnnnnnnnnnnnnnnnnnnnnnnnnnnnnnnnnnnnnnnnnnnnnnnnnnnnnnnnnnnnnnnnnnnnnnnnnnnnnnnnnnnnnnnnnnnnnnnnnnnnnnnnnnnnnnnnnnnnnnnnnnnnnnnnnnnnnnnnnnnnnnnnnnnnnnnnnnnnnnnnnnnnnnnnnnnnnnnnnnnnnnnnnnnnnnnnnnnnnnnnnnnnnnnnnnnnnnnnnnnnnnnnnnnnnnnnnnnnnnnnnnnnnnnnnnnnnnnnnnnnnnnnnnnnnnnnnnnnnnnnnnnnnnnnnnnnnnnnnnnnnnnnnnnnnnnnnnnnnnnnnnnnnnnnnnnnnnnnnnnnnnnnnnnnnnnnnnnnnnnnnnnnnnnnnnnnnnnnnnnnnnnnnnnnnnnnnnnnnnnnnnnnnnnnnnnnnnnnnnnnnnnnnnnnnnnnnnnnnnnnnnnnnnnnnnnnnnnnnnnnnnnnnnnnnnnnnnnnnnnnnnnnnnnnnnnnnnnnnnnnnnnnnnnnnnnnnnnnnnnnnnnnnnnnnnnnnnnnnnnnnnnnnnnnnnnnnnnnnnnnnnnnnnnnnnnnnnnnnnnnnnnnnnnnnnnnnnnnnnnnnnnnnnnnnnnnnnnnnnnnnnnnnnnnnnnnnnnnnnnnnnnnnnnnnnnnnnnnnnnnnnnnnnnnnnnnnnnnnnnnnnnnnnnnnnnnnnnnnnnnnnnnnnnnnnnnnnnnnnnnnnnnnnnnnnnnnnnnnnnnnnnnnnnnnnnnnnnnnnnnnnnnnnnnnnnnnnnnnnnnnnnnnnnnnnnnnnnnnnnnnnnnnnnnnnnnnnnnnnnnnnnnnnnnnnnnnnnnnnnnnnnnnnnnnnnnnnnnnnnnnnnnnnnnnnnnnnnnnnnnnnnnnnnnnnnnnnnnnnnnnnnnnnnnnnnnnnnnnnnnnnnnnnnnnnnnnnnnnnnnnnnnnnnnnnnnnnnnnnnnnnnnnnnnnnnnnnnnnnnnnnnnnnnnnnnnnnnnnnnnnnnnnnnnnnnnnnnnnnnnnnnnnnnnnnnnnnnnnnnnnnnnnnnnnnnnnnnnnnnnnnnnnnnnnnnnnnnnnnnnnnnnnnnnnnnnnnnnnnnnnnnnnnnnnnnnnnnnnnnnnnnnnnnnnnnnnnnnnnnnnnnnnnnnnnnnnnnnnnnnnnnnnnnnnnnnnnnnnnnnnnnnnnnnnnnnnnnnnnnnnnnnnnnnnnnnnnnnnnnnnnnnnnnnnnnnnnnnnnnnnnnnnnnnnnnnnnnnnnnnnnnnnnnnnnnnnnnnnnnnnnnnnnnnnnnnnnnnnnnnnnnnnnnnnnnnnnnnnnnnnnnnnnnnnnnnnnnnnnnnnnnnnnnnnnnnnnnnnnnnnnnnnnnnnnnnnnnnnnnnnnnnnnnnnnnnnnnnnnnnnnnnnnnnnnnnnnnnnnnnnnnnnnnnnnnnnnnnnnnnnnnnnnnnnnnnnnnnnnnnnnnnnnnnnnnnnnnnnnnnnnnnnnnnnnnnnnnnnnnnnnnnnnnnnnnnnnnnnnnnnnnnnnnnnnnnnnnnnnnnnnnnnnnnnnnnnnnnnnnnnnnnnnnnnnnnnnnnnnnnnnnnnnnnnnnnnnnnnnnnnnnnnnnnnnnnnnnnnnnnnnnnnnnnnnnnnnnnnnnnnnnnnnnnnnnnnnnnnnnnnnnnnnnnnnnnnnnnnnnnnnnnnnnnnnnnnnnnnnnnnnnnnnnnnnnnnnnnnnnnnnnnnnnnnnnnnnnnnnnnnnnnnnnnnnnnnnnnnnnnnnnnnnnnnnnnnnnnnnnnnnnnnnnnnnnnnnnnnnnnnnnnnnnnnnnnnnnnnnnnnnnnnnnnnnnnnnnnnnnnnnnnnnnnnnnnnnnnnnnnnnnnnnnnnnnnnnnnnnnnnnnnnnnnnnnnnnnnnnnnnnnnnnnnnnnnnnnnnnnnnnnnnnnnnnnnnnnnnnnnnnnnnnnnnnnnnnnnnnnnnnnnnnnnnnnnnnnnnnnnnnnnnnnnnnnnnnnnnnnnnnnnnnnnnnnnnnnnnnnnnnnnnnnnnnnnnnnnnnnnnnnnnnnnnnnnnnnnnnnnnnnnnnnnnnnnnnnnnnnnnnnnnnnnnnnnnnnnnnnnnnnnnnnnnnnnnnnnnnnnnnnnnnnnnnnnnnnnnnnnnnnnnnnnnnnnnnnnnnnnnnnnnnnnnnnnnnnnnnnnnnnnnnnnnnnnnnnnnnnnnnnnnnnnnnnnnnnnnnnnnnnnnnnnnnnnnnnnnnnnnnnnnnnnnnnnnnnnnnnnnnnnnnnnnnnnnnnnnnnnnnnnnnnnnnnnnnnnnnnnnnnnnnnnnnnnnnnnnnnnnnnnnnnnnnnnnnnnnnnnnnnnnnnnnnnnnnnnnnnnnnnnnnnnnnnnnnnnnnnnnnnnnnnnnnnnnnnnnnnnnnnnnnnnnnnnnnnnnnnnnnnnnnnnnnnnnnnnnnnnnnnnnnnnnnnnnnnnnnnnnnnnnnnnnnnnnnnnnnnnnnnnnnnnnnnnnnnnnnnnnnnnnnnnnnnnnnnnnnnnnnnnnnnnnnnnnnnnnnnnnnnnnnnnnnnnnnnnnnnnnnnnnnnnnnnnnnnnnnnnnnnnnnnnnnnnnnnnnnnnnnnnnnnnnnnnnnnnnnnnnnnnnnnnnnnnnnnnnnnnnnnnnnnnnnnnnnnnnnnnnnnnnnnnnnnnnnnnnnnnnnnnnnnnnnnnnnnnnnnnnnnnnnnnnnnnnnnnnnnnnnnnnnnnnnnnnnnnnnnnnnnnnnnnnnnnnnnnnnnnnnnnnnnnnnnnnnnnnnnnnnnnnnnnnnnnnnnnnnnnnnnnnnnnnnnnnnnnnnnnnnnnnnnnnnnnnnnnnnnnnnnnnnnnnnnnnnnnnnnnnnnnnnnnnnnnnnnnnnnnnnnnnnnnnnnnnnnnnnnnnnnnnnnnnnnnnnnnnnnnnnnnnnnnnnnnnnnnnnnnnnnnnnnnnnnnnnnnnnnnnnnnnnnnnnnnnnnnnnnnnnnnnnnnnnnnnnnnnnnnnnnnnnnnnnnnnnnnnnnnnnnnnnnnnnnnnnnnnnnnnnnnnnnnnnnnnnnnnnnnnnnnnnnnnnnnnnnnnnnnnnnnnnnnnnnnnnnnnnnnnnnnnnnnnnnnnnnnnnnnnnnnnnnnnnnnnnnnnnnnnnnnnnnnnnnnnnnnnnnnnnnnnnnnnnnnnnnnnnnnnnnnnnnnnnnnnnnnnnnnnnnnnnnnnnnnnnnnnnnnnnnnnnnnnnnnnnnnnnnnnnnnnnnnnnnnnnnnnnnnnnnnnnnnnnnnnnnnnnnnnnnnnnnnnnnnnnnnnnnnnnnnnnnnnnnnnnnnnnnnnnnnnnnnnnnnnnnnnnnnnnnnnnnnnnnnnnnnnnnnnnnnnnnnnnnnnnnnnnnnnnnnnnnnnnnnnnnnnnnnnnnnnnnnnnnnnnnnnnnnnnnnnnnnnnnnnnnnnnnnnnnnnnnnnnnnnnnnnnnnnnnnnnnnnnnnnnnnnnnnnnnnnnnnnnnnnnnnnnnnnnnnnnnnnnnnnnnnnnnnnnnnnnnnnnnnnnnnnnnnnnnnnnnnnnnnnnnnnnnnnnnnnnnnnnnnnnnnnnnnnnnnnnnnnnnnnnnnnnnnnnnnnnnnnnnnnnnnnnnnnnnnnnnnnnnnnnnnnnnnnnnnnnnnnnnnnnnnnnnnnnnnnnnnnnnnnnnnnnnnnnnnnnnnnnnnnnnnnnnnnnnnnnnnnnnnnnnnnnnnnnnnnnnnnnnnnnnnnnnnnnnnnnnnnnnnnnnnnnnnnnnnnnnnnnnnnnnnnnnnnnnnnnnnnnnnnnnnnnnnnnnnnnnnnnnnnnnnnnnnnnnnnnnnnnnnnnnnnnnnnnnnnnnnnnnnnnnnnnnnnnnnnnnnnnnnnnnnnnnnnnnnnnnnnnnnnnnnnnnnnnnnnnnnnnnnnnnnnnnnnnnnnnnnnnnnnnnnnnnnnnnnnnnnnnnnnnnnnnnnnnnnnnnnnnnnnnnnnnnnnnnnnnnnnnnnnnnnnnnnnnnnnnnnnnnnnnnnnnnnnnnnnnnnnnnnnnnnnnnnnnnnnnnnnnnnnnnnnnnnnnnnnnnnnnnnnnnnnnnnnnnnnnnnnnnnnnnnnnnnnnnnnnnnnnnnnnnnnnnnnnnnnnnnnnnnnnnnnnnnnnnnnnnnnnnnnnnnnnnnnnnnnnnnnnnnnnnnnnnnnnnnnnnnnnnnnnnnnnnnnnnnnnnnnnnnnnnnnnnnnnnnnnnnnnnnnnnnnnnnnnnnnnnnnnnnnnnnnnnnnnnnnnnnnnnnnnnnnnnnnnnnnnnnnnnnnnnnnnnnnnnnnnnnnnnnnnnnnnnnnnnnnnnnnnnnnnnnnnnnnnnnnnnnnnnnnnnnnnnnnnnnnnnnnnnnnnnnnnnnnnnnnnnnnnnnnnnnnnnnnnnnnnnnnnnnnnnnnnnnnnnnnnnnnnnnnnnnnnnnnnnnnnnnnnnnnnnnnnnnnnnnnnnnnnnnnnnnnnnnnnnnnnnnnnnnnnnnnnnnnnnnnnnnnnnnnnnnnnnnnnnnnnnnnnnnnnnnnnnnnnnnnnnnnnnnnnnnnnnnnnnnnnnnnnnnnnnnnnnnnnnnnnnnnnnnnnnnnnnnnnnnnnnnnnnnnnnnnnnnnnnnnnnnnnnnnnnnnnnnnnnnnnnnnnnnnnnnnnnnnnnnnnnnnnnnnnnnnnnnnnnnnnnnnnnnnnnnnnnnnnnnnnnnnnnnnnnnnnnnnnnnnnnnnnnnnnnnnnnnnnnnnnnnnnnnnnnnnnnnnnnnnnnnnnnnnnnnnnnnnnnnnnnnnnnnnnnnnnnnnnnnnnnnnnnnnnnnnnnnnnnnnnnnnnnnnnnnnnnnnnnnnnnnnnnnnnnnnnnnnnnnnnnnnnnnnnnnnnnnnnnnnnnnnnnnnnnnnnnnnnnnnnnnnnnnnnnnnnnnnnnnnnnnnnnnnnnnnnnnnnnnnnnnnnnnnnnnnnnnnnnnnnnnnnnnnnnnnnnnnnnnnnnnnnnnnnnnnnnnnnnnnnnnnnnnnnnnnnnnnnnnnnnnnnnnnnnnnnnnnnnnnnnnnnnnnnnnnnnnnnnnnnnnnnnnnnnnnnnnnnnnnnnnnnnnnnnnnnnnnnnnnnnnnnnnnnnnnnnnnnnnnnnnnnnnnnnnnnnnnnnnnnnnnnnnnnnnnnnnnnnnnnnnnnnnnnnnnnnnnnnnnnnnnnnnnnnnnnnnnnnnnnnnnnnnnnnnnnnnnnnnnnnnnnnnnnnnnnnnnnnnnnnnnnnnnnnnnnnnnnnnnnnnnnnnnnnnnnnnnnnnnnnnnnnnnnnnnnnnnnnnnnnnnnnnnnnnnnnnnnnnnnnnnnnnnnnnnnnnnnnnnnnnnnnnnnnnnnnnnnnnnnnnnnnnnnnnnnnnnnnnnnnnnnnnnnnnnnnnnnnnnnnnnnnnnnnnnnnnnnnnnnnnnnnnnnnnnnnnnnnnnnnnnnnnnnnnnnnnnnnnnnnnnnnnnnnnnnnnnnnnnnnnnnnnnnnnnnnnnnnnnnnnnnnnnnnnnnnnnnnnnnnnnnnnnnnnnnnnnnnnnnnnnnnnnnnnnnnnnnnnnnnnnnnnnnnnnnnnnnnnnnnnnnnnnnnnnnnnnnnnnnnnnnnnnnnnnnnnnnnnnnnnnnnnnnnnnnnnnnnnnnnnnnnnnnnnnnnnnnnnnnnnnnnnnnnnnnnnnnnnnnnnnnnnnnnnnnnnnnnnnnnnnnnnnnnnnnnnnnnnnnnnnnnnnnnnnnnnnnnnnnnnnnnnnnnnnnnnnnnnnnnnnnnnnnnnnnnnnnnnnnnnnnnnnnnnnnnnnnnnnnnnnnnnnnnnnnnnnnnnnnnnnnnnnnnnnnnnnnnnnnnnnnnnnnnnnnnnnnnnnnnnnnnnnnnnnnnnnnnnnnnnnnnnnnnnnnnnnnnnnnnnnnnnnnnnnnnnnnnnnnnnnnnnnnnnnnnnnnnnnnnnnnnnnnnnnnnnnnnnnnnnnnnnnnnnnnnnnnnnnnnnnnnnnnnnnnnnnnnnnnnnnnnnnnnnnnnnnnnnnnnnnnnnnnnnnnnnnnnnnnnnnnnnnnnnnnnnnnnnnnnnnnnnnnnnnnnnnnnnnnnnnnnnnnnnnnnnnnnnnnnnnnnnnnnnnnnnnnnnnnnnnnnnnnnnnnnnnnnnnnnnnnnnnnnnnnnnnnnnnnnnnnnnnnnnnnnnnnnnnnnnnnnnnnnnnnnnnnnnnnnnnnnnnnnnnnnnnnnnnnnnnnnnnnnnnnnnnnnnnnnnnnnnnnnnnnnnnnnnnnnnnnnnnnnnnnnnnnnnnnnnnnnnnnnnnnnnnnnnnnnnnnnnnnnnnnnnnnnnnnnnnnnnnnnnnnnnnnnnnnnnnnnnnnnnnnnnnnnnnnnnnnnnnnnnnnnnnnnnnnnnnnnnnnnnnnnnnnnnnnnnnnnnnnnnnnnnnnnnnnnnnnnnnnnnnnnnnnnnnnnnnnnnnnnnnnnnnnnnnnnnnnnnnnnnnnnnnnnnnnnnnnnnnnnnnnnnnnnnnnnnnnnnnnnnnnnnnnnnnnnnnnnnnnnnnnnnnnnnnnnnnnnnnnnnnnnnnnnnnnnnnnnnnnnnnnnnnnnnnnnnnnnnnnnnnnnnnnnnnnnnnnnnnnnnnnnnnnnnnnnnnnnnnnnnnnnnnnnnnnnnnnnnnnnnnnnnnnnnnnnnnnnnnnnnnnnnnnnnnnnnnnnnnnnnnnnnnnnnnnnnnnnnnnnnnnnnnnnnnnnnnnnnnnnnnnnnnnnnnnnnnnnnnnnnnnnnnnnnnnnnnnnnnnnnnnnnnnnnnnnnnnnnnnnnnnnnnnnnnnnnnnnnnnnnnnnnnnnnnnnnnnnnnnnnnnnnnnnnnnnnnnnnnnnnnnnnnnnnnnnnnnnnnnnnnnnnnnnnnnnnnnnnnnnnnnnnnnnnnnnnnnnnnnnnnnnnnnnnnnnnnnnnnnnnnnnnnnnnnnnnnnnnnnnnnnnnnnnnnnnnnnnnnnnnnnnnnnnnnnnnnnnnnnnnnnnnnnnnnnnnnnnnnnnnnnnnnnnnnnnnnnnnnnnnnnnnnnnnnnnnnnnnnnnnnnnnnnnnnnnnnnnnnnnnnnnnnnnnnnnnnnnnnnnnnnnnnnnnnnnnnnnnnnnnnnnnnnnnnnnnnnnnnnnnnnnnnnnnnnnnnnnnnnnnnnnnnnnnnnnnnnnnnnnnnnnnnnnnnnnnnnnnnnnnnnnnnnnnnnnnnnnnnnnnnnnnnnnnnnnnnnnnnnnnnnnnnnnnnnnnnnnnnnnnnnnnnnnnnnnnnnnnnnnnnnnnnnnnnnnnnnnnnnnnnnnnnnnnnnnnnnnnnnnnnnnnnnnnnnnnnnnnnnnnnnnnnnnnnnnnnnnnnnnnnnnnnnnnnnnnnnnnnnnnnnnnnnnnnnnnnnnnnnnnnnnnnnnnnnnnnnnnnnnnnnnnnnnnnnnnnnnnnnnnnnnnnnnnnnnnnnnnnnnnnnnnnnnnnnnnnnnnnnnnnnnnnnnnnnnnnnnnnnnnnnnnnnnnnnnnnnnnnnnnnnnnnnnnnnnnnnnnnnnnnnnnnnnnnnnnnnnnnnnnnnnnnnnnnnnnnnnnnnnnnnnnnnnnnnnnnnnnnnnnnnnnnnnnnnnnnnnnnnnnnnnnnnnnnnnnnnnnnnnnnnnnnnnnnnnnnnnnnnnnnnnnnnnnnnnnnnnnnnnnnnnnnnnnnnnnnnnnnnnnnnnnnnnnnnnnnnnnnnnnnnnnnnnnnnnnnnnnnnnnnnnnnnnnnnnnnnnnnnnnnnnnnnnnnnnnnnnnnnnnnnnnnnnnnnnnnnnnnnnnnnnnnnnnnnnnnnnnnnnnnnnnnnnnnnnnnnnnnnnnnnnnnnnnnnnnnnnnnnnnnnnnnnnnnnnnnnnnnnnnnnnnnnnnnnnnnnnnnnnnnnnnnnnnnnnnnnnnnnnnnnnnnnnnnnnnnnnnnnnnnnnnnnnnnnnnnnnnnnnnnnnnnnnnnnnnnnnnnnnnnnnnnnnnnnnnnnnnnnnnnnnnnnnnnnnnnnnnnnnnnnnnnnnnnnnnnnnnnnnnnnnnnnnnnnnnnnnnnnnnnnnnnnnnnnnnnnnnnnnnnnnnnnnnnnnnnnnnnnnnnnnnnnnnnnnnnnnnnnnnnnnnnnnnnnnnnnnnnnnnnnnnnnnnnnnnnnnnnnnnnnnnnnnnnnnnnnnnnnnnnnnnnnnnnnnnnnnnnnnnnnnnnnnnnnnnnnnnnnnnnnnnnnnnnnnnnnnnnnnnnnnnnnnnnnnnnnnnnnnnnnnnnnnnnnnnnnnnnnnnnnnnnnnnnnnnnnnnnnnnnnnnnnnnnnnnnnnnnnnnnnnnnnnnnnnnnnnnnnnnnnnnnnnnnnnnnnnnnnnnnnnnnnnnnnnnnnnnnnnnnnnnnnnnnnnnnnnnnnnnnnnnnnnnnnnnnnnnnnnnnnnnnnnnnnnnnnnnnnnnnnnnnnnnnnnnnnnnnnnnnnnnnnnnnnnnnnnnnnnnnnnnnnnnnnnnnnnnnnnnnnnnnnnnnnnnnnnnnnnnnnnnnnnnnnnnnnnnnnnnnnnnnnnnnnnnnnnnnnnnnnnnnnnnnnnnnnnnnnnnnnnnnnnnnnnnnnnnnnnnnnnnnnnnnnnnnnnnnnnnnnnnnnnnnnnnnnnnnnnnnnnnnnnnnnnnnnnnnnnnnnnnnnnnnnnnnnnnnnnnnnnnnnnnnnnnnnnnnnnnnnnnnnnnnnnnnnnnnnnnnnnnnnnnnnnnnnnnnnnnnnnnnnnnnnnnnnnnnnnnnnnnnnnnnnnnnnnnnnnnnnnnnnnnnnnnnnnnnnnnnnnnnnnnnnnnnnnnnnnnnnnnnnnnnnnnnnnnnnnnnnnnnnnnnnnnnnnnnnnnnnnnnnnnnnnnnnnnnnnnnnnnnnnnnnnnnnnnnnnnnnnnnnnnnnnnnnnnnnnnnnnnnnnnnnnnnnnnnnnnnnnnnnnnnnnnnnnnnnnnnnnnnnnnnnnnnnnnnnnnnnnnnnnnnnnnnnnnnnnnnnnnnnnnnnnnnnnnnnnnnnnnnnnnnnnnnnnnnnnnnnnnnnnnnnnnnnnnnnnnnnnnnnnnnnnnnnnnnnnnnnnnnnnnnnnnnnnnnnnnnnnnnnnnnnnnnnnnnnnnnnnnnnnnnnnnnnnnnnnnnnnnnnnnnnnnnnnnnnnnnnnnnnnnnnnnnnnnnnnnnnnnnnnnnnnnnnnnnnnnnnnnnnnnnnnnnnnnnnnnnnnnnnnnnnnnnnnnnnnnnnnnnnnnnnnnnnnnnnnnnnnnnnnnnnnnnnnnnnnnnnnnnnnnnnnnnnnnnnnnnnnnnnnnnnnnnnnnnnnnnnnnnnnnnnnnnnnnnnnnnnnnnnnnnnnnnnnnnnnnnnnnnnnnnnnnnnnnnnnnnnnnnnnnnnnnnnnnnnnnnnnnnnnnnnnnnnnnnnnnnnnnnnnnnnnnnnnnnnnnnnnnnnnnnnnnnnnnnnnnnnnnnnnnnnnnnnnnnnnnnnnnnnnnnnnnnnnnnnnnnnnnnnnnnnnnnnnnnnnnnnnnnnnnnnnnnnnnnnnnnnnnnnnnnnnnnnnnnnnnnnnnnnnnnnnnnnnnnnnnnnnnnnnnnnnnnnnnnnnnnnnnnnnnnnnnnnnnnnnnnnnnnnnnnnnnnnnnnnnnnnnnnnnnnnnnnnnnnnnnnnnnnnnnnnnnnnnnnnnnnnnnnnnnnnnnnnnnnnnnnnnnnnnnnnnnnnnnnnnnnnnnnnnnnnnnnnnnnnnnnnnnnnnnnnnnnnnnnnnnnnnnnnnnnnnnnnnnnnnnnnnnnnnnnnnnnnnnnnnnnnnnnnnnnnnnnnnnnnnnnnnnnnnnnnnnnnnnnnnnnnnnnnnnnnnnnnnnnnnnnnnnnnnnnnnnnnnnnnnnnnnnnnnnnnnnnnnnnnnnnnnnnnnnnnnnnnnnnnnnnnnnnnnnnnnnnnnnnnnnnnnnnnnnnnnnnnnnnnnnnnnnnnnnnnnnnnnnnnnnnnnnnnnnnnnnnnnnnnnnnnnnnnnnnnnnnnnnnnnnnnnnnnnnnnnnnnnnnnnnnnnnnnnnnnnnnnnnnnnnnnnnnnnnnnnnnnnnnnnnnnnnnnnnnnnnnnnnnnnnnnnnnnnnnnnnnnnnnnnnnnnnnnnnnnnnnnnnnnnnnnnnnnnnnnnnnnnnnnnnnnnnnnnnnnnnnnnnnnnnnnnnnnnnnnnnnnnnnnnnnnnnnnnnnnnnnnnnnnnnnnnnnnnnnnnnnnnnnnnnnnnnnnnnnnnnnnnnnnnnnnnnnnnnnnnnnnnnnnnnnnnnnnnnnnnnnnnnnnnnnnnnnnnnnnnnnnnnnnnnnnnnnnnnnnnnnnnnnnnnnnnnnnnnnnnnnnnnnnnnnnnnnnnnnnnnnnnnnnnnnnnnnnnnnnnnnnnnnnnnnnnnnnnnnnnnnnnnnnnnnnnnnnnnnnnnnnnnnnnnnnnnnnnnnnnnnnnnnnnnnnnnnnnnnnnnnnnnnnnnnnnnnnnnnnnnnnnnnnnnnnnnnnnnnnnnnnnnnnnnnnnnnnnnnnnnnnnnnnnnnnnnnnnnnnnnnnnnnnnnnnnnnnnnnnnnnnnnnnnnnnnnnnnnnnnnnnnnnnnnnnnnnnnnnnnnnnnnnnnnnnnnnnnnnnnnnnnnnnnnnnnnnnnnnnnnnnnnnnnnnnnnnnnnnnnnnnnnnnnnnnnnnnnnnnnnnnnnnnnnnnnnnnnnnnnnnnnnnnnnnnnnnnnnnnnnnnnnnnnnnnnnnnnnnnnnnnnnnnnnnnnnnnnnnnnnnnnnnnnnnnnnnnnnnnnnnnnnnnnnnnnnnnnnnnnnnnnnnnnnnnnnnnnnnnnnnnnnnnnnnnnnnnnnnnnnnnnnnnnnnnnnnnnnnnnnnnnnnnnnnnnnnnnnnnnnnnnnnnnnnnnnnnnnnnnnnnnnnnnnnnnnnnnnnnnnnnnnnnnnnnnnnnnnnnnnnnnnnnnnnnnnnnnnnnnnnnnnnnnnnnnnnnnnnnnnnnnnnnnnnnnnnnnnnnnnnnnnnnnnnnnnnnnnnnnnnnnnnnnnnnnnnnnnnnnnnnnnnnnnnnnnnnnnnnnnnnnnnnnnnnnnnnnnnnnnnnnnnnnnnnnnnnnnnnnnnnnnnnnnnnnnnnnnnnnnnnnnnnnnnnnnnnnnnnnnnnnnnnnnnnnnnnnnnnnnnnnnnnnnnnnnnnnnnnnnnnnnnnnnnnnnnnnnnnnnnnnnnnnnnnnnnnnnnnnnnnnnnnnnnnnnnnnnnnnnnnnnnnnnnnnnnnnnnnnnnnnnnnnnnnnnnnnnnnnnnnnnnnnnnnnnnnnnnnnnnnnnnnnnnnnnnnnnnnnnnnnnnnnnnnnnnnnnnnnnnnnnnnnnnnnnnnnnnnnnnnnnnnnnnnnnnnnnnnnnnnnnnnnnnnnnnnnnnnnnnnnnnnnnnnnnnnnnnnnnnnnnnnnnnnnnnnnnnnnnnnnnnnnnnnnnnnnnnnnnnnnnnnnnnnnnnnnnnnnnnnnnnnnnnnnnnnnnnnnnnnnnnnnnnnnnnnnnnnnnnnnnnnnnnnnnnnnnnnnnnnnnnnnnnnnnnnnnnnnnnnnnnnnnnnnnnnnnnnnnnnnnnnnnnnnnnnnnnnnnnnnnnnnnnnnnnnnnnnnnnnnnnnnnnnnnnnnnnnnnnnnnnnnnnnnnnnnnnnnnnnnnnnnnnnnnnnnnnnnnnnnnnnnnnnnnnnnnnnnnnnnnnnnnnnnnnnnnnnnnnnnnnnnnnnnnnnnnnnnnnnnnnnnnnnnnnnnnnnnnnnnnnnnnnnnnnnnnnnnnnnnnnnnnnnnnnnnnnnnnnnnnnnnnnnnnnnnnnnnnnnnnnnnnnnnnnnnnnnnnnnnnnnnnnnnnnnnnnnnnnnnnnnnnnnnnnnnnnnnnnnnnnnnnnnnnnnnnnnnnnnnnnnnnnnnnnnnnnnnnnnnnnnnnnnnnnnnnnnnnnnnnnnnnnnnnnnnnnnnnnnnnnnnnnnnnnnnnnnnnnnnnnnnnnnnnnnnnnnnnnnnnnnnnnnnnnnnnnnnnnnnnnnnnnnnnnnnnnnnnnnnnnnnnnnnnnnnnnnnnnnnnnnnnnnnnnnnnnnnnnnnnnnnnnnnnnnnnnnnnnnnnnnnnnnnnnnnnnnnnnnnnnnnnnnnnnnnnnnnnnnnnnnnnnnnnnnnnnnnnnnnnnnnnnnnnnnnnnnnnnnnnnnnnnnnnnnnnnnnnnnnnnnnnnnnnnnnnnnnnnnnnnnnnnnnnnnnnnnnnnnnnnnnnnnnnnnnnnnnnnnnnnnnnnnnnnnnnnnnnnnnnnnnnnnnnnnnnnnnnnnnnnnnnnnnnnnnnnnnnnnnnnnnnnnnnnnnnnnnnnnnnnnnnnnnnnnnnnnnnnnnnnnnnnnnnnnnnnnnnnnnnnnnnnnnnnnnnnnnnnnnnnnnnnnnnnnnnnnnnnnnnnnnnnnnnnnnnnnnnnnnnnnnnnnnnnnnnnnnnnnnnnnnnnnnnnnnnnnnnnnnnnnnnnnnnnnnnnnnnnnnnnnnnnnnnnnnnnnnnnnnnnnnnnnnnnnnnnnnnnnnnnnnnnnnnnnnnnnnnnnnnnnnnnnnnnnnnnnnnnnnnnnnnnnnnnnnnnnnnnnnnnnnnnnnnnnnnnnnnnnnnnnnnnnnnnnnnnnnnnnnnnnnnnnnnnnnnnnnnnnnnnnnnnnnnnnnnnnnnnnnnnnnnnnnnnnnnnnnnnnnnnnnnnnnnnnnnnnnnnnnnnnnnnnnnnnnnnnnnnnnnnnnnnnnnnnnnnnnnnnnnnnnnnnnnnnnnnnnnnnnnnnnnnnnnnnnnnnnnnnnnnnnnnnnnnnnnnnnnnnnnnnnnnnnnnnnnnnnnnnnnnnnnnnnnnnnnnnnnnnnnnnnnnnnnnnnnnnnnnnnnnnnnnnnnnnnnnnnnnnnnnnnnnnnnnnnnnnnnnnnnnnnnnnnnnnnnnnnnnnnnnnnnnnnnnnnnnnnnnnnnnnnnnnnnnnnnnnnnnnnnnnnnnnnnnnnnnnnnnnnnnnnnnnnnnnnnnnnnnnnnnnnnnnnnnnnnnnnnnnnnnnnnnnnnnnnnnnnnnnnnnnnnnnnnnnnnnnnnnnnnnnnnnnnnnnnnnnnnnnnnnnnnnnnnnnnnnnnnnnnnnnnnnnnnnnnnnnnnnnnnnnnnnnnnnnnnnnnnnnnnnnnnnnnnnnnnnnnnnnnnnnnnnnnnnnnnnnnnnnnnnnnnnnnnnnnnnnnnnnnnnnnnnnnnnnnnnnnnnnnnnnnnnnnnnnnnnnnnnnnnnnnnnnnnnnnnnnnnnnnnnnnnnnnnnnnnnnnnnnnnnnnnnnnnnnnnnnnnnnnnnnnnnnnnnnnnnnnnnnnnnnnnnnnnnnnnnnnnnnnnnnnnnnnnnnnnnnnnnnnnnnnnnnnnnnnnnnnnnnnnnnnnnnnnnnnnnnnnnnnnnnnnnnnnnnnnnnnnnnnnnnnnnnnnnnnnnnnnnnnnnnnnnnnnnnnnnnnnnnnnnnnnnnnnnnnnnnnnnnnnnnnnnnnnnnnnnnnnnnnnnnnnnnnnnnnnnnnnnnnnnnnnnnnnnnnnnnnnnnnnnnnnnnnnnnnnnnnnnnnnnnnnnnnnnnnnnnnnnnnnnnnnnnnnnnnnnnnnnnnnnnnnnnnnnnnnnnnnnnnnnnnnnnnnnnnnnnnnnnnnnnnnnnnnnnnnnnnnnnnnnnnnnnnnnnnnnnnnnnnnnnnnnnnnnnnnnnnnnnnnnnnnnnnnnnnnnnnnnnnnnnnnnnnnnnnnnnnnnnnnnnnnnnnnnnnnnnnnnnnnnnnnnnnnnnnnnnnnnnnnnnnnnnnnnnnnnnnnnnnnnnnnnnnnnnnnnnnnnnnnnnnnnnnnnnnnnnnnnnnnnnnnnnnnnnnnnnnnnnnnnnnnnnnnnnnnnnnnnnnnnnnnnnnnnnnnnnnnnnnnnnnnnnnnnnnnnnnnnnnnnnnnnnnnnnnnnnnnnnnnnnnnnnnnnnnnnnnnnnnnnnnnnnnnnnnnnnnnnnnnnnnnnnnnnnnnnnnnnnnnnnnnnnnnnnnnnnnnnnnnnnnnnnnnnnnnnnnnnnnnnnnnnnnnnnnnnnnnnnnnnnnnnnnnnnnnnnnnnnnnnnnnnnnnnnnnnnnnnnnnnnnnnnnnnnnnnnnnnnnnnnnnnnnnnnnnnnnnnnnnnnnnnnnnnnnnnnnnnnnnnnnnnnnnnnnnnnnnnnnnnnnnnnnnnnnnnnnnnnnnnnnnnnnnnnnnnnnnnnnnnnnnnnnnnnnnnnnnnnnnnnnnnnnnnnnnnnnnnnnnnnnnnnnnnnnnnnnnnnnnnnnnnnnnnnnnnnnnnnnnnnnnnnnnnnnnnnnnnnnnnnnnnnnnnnnnnnnnnnnnnnnnnnnnnnnnnnnnnnnnnnnnnnnnnnnnnnnnnnnnnnnnnnnnnnnnnnnnnnnnnnnnnnnnnnnnnnnnnnnnnnnnnnnnnnnnnnnnnnnnnnnnnnnnnnnnnnnnnnnnnnnnnnnnnnnnnnnnnnnnnnnnnnnnnnnnnnnnnnnnnnnnnnnnnnnnnnnnnnnnnnnnnnnnnnnnnnnnnnnnnnnnnnnnnnnnnnnnnnnnnnnnnnnnnnnnnnnnnnnnnnnnnnnnnnnnnnnnnnnnnnnnnnnnnnnnnnnnnnnnnnnnnnnnnnnnnnnnnnnnnnnnnnnnnnnnnnnnnnnnnnnnnnnnnnnnnnnnnnnnnnnnnnnnnnnnnnnnnnnnnnnnnnnnnnnnnnnnnnnnnnnnnnnnnnnnnnnnnnnnnnnnnnnnnnnnnnnnnnnnnnnnnnnnnnnnnnnnnnnnnnnnnnnnnnnnnnnnnnnnnnnnnnnnnnnnnnnnnnnnnnnnnnnnnnnnnnnnnnnnnnnnnnnnnnnnnnnnnnnnnnnnnnnnnnnnnnnnnnnnnnnnnnnnnnnnnnnnnnnnnnnnnnnnnnnnnnnnnnnnnnnnnnnnnnnnnnnnnnnnnnnnnnnnnnnnnnnnnnnnnnnnnnnnnnnnnnnnnnnnnnnnnnnnnnnnnnnnnnnnnnnnnnnnnnnnnnnnnnnnnnnnnnnnnnnnnnnnnnnnnnnnnnnnnnnnnnnnnnnnnnnnnnnnnnnnnnnnnnnnnnnnnnnnnnnnnnnnnnnnnnnnnnnnnnnnnnnnnnnnnnnnnnnnnnnnnnnnnnnnnnnnnnnnnnnnnnnnnnnnnnnnnnnnnnnnnnnnnnnnnnnnnnnnnnnnnnnnnnnnnnnnnnnnnnnnnnnnnnnnnnnnnnnnnnnnnnnnnnnnnnnnnnnnnnnnnnnnnnnnnnnnnnnnnnnnnnnnnnnnnnnnnnnnnnnnnnnnnnnnnnnnnnnnnnnnnnnnnnnnnnnnnnnnnnnnnnnnnnnnnnnnnnnnnnnnnnnnnnnnnnnnnnnnnnnnnnnnnnnnnnnnnnnnnnnnnnnnnnnnnnnnnnnnnnnnnnnnnnnnnnnnnnnnnnnnnnnnnnnnnnnnnnnnnnnnnnnnnnnnnnnnnnnnnnnnnnnnnnnnnnnnnnnnnnnnnnnnnnnnnnnnnnnnnnnnnnnnnnnnnnnnnnnnnnnnnnnnnnnnnnnnnnnnnnnnnnnnnnnnnnnnnnnnnnnnnnnnnnnnnnnnnnnnnnnnnnnnnnnnnnnnnnnnnnnnnnnnnnnnnnnnnnnnnnnnnnnnnnnnnnnnnnnnnnnnnnnnnnnnnnnnnnnnnnnnnnnnnnnnnnnnnnnnnnnnnnnnnnnnnnnnnnnnnnnnnnnnnnnnnnnnnnnnnnnnnnnnnnnnnnnnnnnnnnnnnnnnnnnnnnnnnnnnnnnnnnnnnnnnnnnnnnnnnnnnnnnnnnnnnnnnnnnnnnnnnnnnnnnnnnnnnnnnnnnnnnnnnnnnnnnnnnnnnnnnnnnnnnnnnnnnnnnnnnnnnnnnnnnnnnnnnnnnnnnnnnnnnnnnnnnnnnnnnnnnnnnnnnnnnnnnnnnnnnnnnnnnnnnnnnnnnnnnnnnnnnnnnnnnnnnnnnnnnnnnnnnnnnnnnnnnnnnnnnnnnnnnnnnnnnnnnnnnnnnnnnnnnnnnnnnnnnnnnnnnnnnnnnnnnnnnnnnnnnnnnnnnnnnnnnnnnnnnnnnnnnnnnnnnnnnnnnnnnnnnnnnnnnnnnnnnnnnnnnnnnnnnnnnnnnnnnnnnnnnnnnnnnnnnnnnnnnnnnnnnnnnnnnnnnnnnnnnnnnnnnnnnnnnnnnnnnnnnnnnnnnnnnnnnnnnnnnnnnnnnnnnnnnnnnnnnnnnnnnnnnnnnnnnnnnnnnnnnnnnnnnnnnnnnnnnnnnnnnnnnnnnnnnnnnnnnnnnnnnnnnnnnnnnnnnnnnnnnnnnnnnnnnnnnnnnnnnnnnnnnnnnnnnnnnnnnnnnnnnnnnnnnnnnnnnnnnnnnnnnnnnnnnnnnnnnnnnnnnnnnnnnnnnnnnnnnnnnnnnnnnnnnnnnnnnnnnnnnnnnnnnnnnnnnnnnnnnnnnnnnnnnnnnnnnnnnnnnnnnnnnnnnnnnnnnnnnnnnnnnnnnnnnnnnnnnnnnnnnnnnnnnnnnnnnnnnnnnnnnnnnnnnnnnnnnnnnnnnnnnnnnnnnnnnnnnnnnnnnnnnnnnnnnnnnnnnnnnnnnnnnnnnnnnnnnnnnnnnnnnnnnnnnnnnnnnnnnnnnnnnnnnnnnnnnnnnnnnnnnnnnnnnnnnnnnnnnnnnnnnnnnnnnnnnnnnnnnnnnnnnnnnnnnnnnnnnnnnnnnnnnnnnnnnnnnnnnnnnnnnnnnnnnnnnnnnnnnnnnnnnnnnnnnnnnnnnnnnnnnnnnnnnnnnnnnnnnnnnnnnnnnnnnnnnnnnnnnnnnnnnnnnnnnnnnnnnnnnnnnnnnnnnnnnnnnnnnnnnnnnnnnnnnnnnnnnnnnnnnnnnnnnnnnnnnnnnnnnnnnnnnnnnnnnnnnnnnnnnnnnnnnnnnnnnnnnnnnnnnnnnnnnnnnnnnnnnnnnnnnnnnnnnnnnnnnnnnnnnnnnnnnnnnnnnnnnnnnnnnnnnnnnnnnnnnnnnnnnnnnnnnnnnnnnnnnnnnnnnnnnnnnnnnnnnnnnnnnnnnnnnnnnnnnnnnnnnnnnnnnnnnnnnnnnnnnnnnnnnnnnnnnnnnnnnnnnnnnnnnnnnnnnnnnnnnnnnnnnnnnnnnnnnnnnnnnnnnnnnnnnnnnnnnnnnnnnnnnnnnnnnnnnnnnnnnnnnnnnnnnnnnnnnnnnnnnnnnnnnnnnnnnnnnnnnnnnnnnnnnnnnnnnnnnnnnnnnnnnnnnnnnnnnnnnnnnnnnnnnnnnnnnnnnnnnnnnnnnnnnnnnnnnnnnnnnnnnnnnnnnnnnnnnnnnnnnnnnnnnnnnnnnnnnnnnnnnnnnnnnnnnnnnnnnnnnnnnnnnnnnnnnnnnnnnnnnnnnnnnnnnnnnnnnnnnnnnnnnnnnnnnnnnnnnnnnnnnnnnnnnnnnnnnnnnnnnnnnnnnnnnnnnnnnnnnnnnnnnnnnnnnnnnnnnnnnnnnnnnnnnnnnnnnnnnnnnnnnnnnnnnnnnnnnnnnnnnnnnnnnnnnnnnnnnnnnnnnnnnnnnnnnnnnnnnnnnnnnnnnnnnnnnnnnnnnnnnnnnnnnnnnnnnnnnnnnnnnnnnnnnnnnnnnnnnnnnnnnnnnnnnnnnnnnnnnnnnnnnnnnnnnnnnnnnnnnnnnnnnnnnnnnnnnnnnnnnnnnnnnnnnnnnnnnnnnnnnnnnnnnnnnnnnnnnnnnnnnnnnnnnnnnnnnnnnnnnnnnnnnnnnnnnnnnnnnnnnnnnnnnnnnnnnnnnnnnnnnnnnnnnnnnnnnnnnnnnnnnnnnnnnnnnnnnnnnnnnnnnnnnnnnnnnnnnnnnnnnnnnnnnnnnnnnnnnnnnnnnnnnnnnnnnnnnnnnnnnnnnnnnnnnnnnnnnnnnnnnnnnnnnnnnnnnnnnnnnnnnnnnnnnnnnnnnnnnnnnnnnnnnnnnnnnnnnnnnnnnnnnnnnnnnnnnnnnnnnnnnnnnnnnnnnnnnnnnnnnnnnnnnnnnnnnnnnnnnnnnnnnnnnnnnnnnnnnnnnnnnnnnnnnnnnnnnnnnnnnnnnnnnnnnnnnnnnnnnnnnnnnnnnnnnnnnnnnnnnnnnnnnnnnnnnnnnnnnnnnnnnnnnnnnnnnnnnnnnnnnnnnnnnnnnnnnnnnnnnnnnnnnnnnnnnnnnnnnnnnnnnnnnnnnnnnnnnnnnnnnnnnnnnnnnnnnnnnnnnnnnnnnnnnnnnnnnnnnnnnnnnnnnnnnnnnnnnnnnnnnnnnnnnnnnnnnnnnnnnnnnnnnnnnnnnnnnnnnnnnnnnnnnnnnnnnnnnnnnnnnnnnnnnnnnnnnnnnnnnnnnnnnnnnnnnnnnnnnnnnnnnnnnnnnnnnnnnnnnnnnnnnnnnnnnnnnnnnnnnnnnnnnnnnnnnnnnnnnnnnnnnnnnnnnnnnnnnnnnnnnnnnnnnnnnnnnnnnnnnnnnnnnnnnnnnnnnnnnnnnnnnnnnnnnnnnnnnnnnnnnnnnnnnnnnnnnnnnnnnnnnnnnnnnnnnnnnnnnnnnnnnnnnnnnnnnnnnnnnnnnnnnnnnnnnnnnnnnnnnnnnnnnnnnnnnnnnnnnnnnnnnnnnnnnnnnnnnnnnnnnnnnnnnnnnnnnnnnnnnnnnnnnnnnnnnnnnnnnnnnnnnnnnnnnnnnnnnnnnnnnnnnnnnnnnnnnnnnnnnnnnnnnnnnnnnnnnnnnnnnnnnnnnnnnnnnnnnnnnnnnnnnnnnnnnnnnnnnnnnnnnnnnnnnnnnnnnnnnnnnnnnnnnnnnnnnnnnnnnnnnnnnnnnnnnnnnnnnnnnnnnnnnnnnnnnnnnnnnnnnnnnnnnnnnnnnnnnnnnnnnnnnnnnnnnnnnnnnnnnnnnnnnnnnnnnnnnnnnnnnnnnnnnnnnnnnnnnnnnnnnnnnnnnnnnnnnnnnnnnnnnnnnnnnnnnnnnnnnnnnnnnnnnnnnnnnnnnnnnnnnnnnnnnnnnnnnnnnnnnnnnnnnnnnnnnnnnnnnnnnnnnnnnnnnnnnnnnnnnnnnnnnnnnnnnnnnnnnnnnnnnnnnnnnnnnnnnnnnnnnnnnnnnnnnnnnnnnnnnnnnnnnnnnnnnnnnnnnnnnnnnnnnnnnnnnnnnnnnnnnnnnnnnnnnnnnnnnnnnnnnnnnnnnnnnnnnnnnnnnnnnnnnnnnnnnnnnnnnnnnnnnnnnnnnnnnnnnnnnnnnnnnnnnnnnnnnnnnnnnnnnnnnnnnnnnnnnnnnnnnnnnnnnnnnnnnnnnnnnnnnnnnnnnnnnnnnnnnnnnnnnnnnnnnnnnnnnnnnnnnnnnnnnnnnnnnnnnnnnnnnnnnnnnnnnnnnnnnnnnnnnnnnnnnnnnnnnnnnnnnnnnnnnnnnnnnnnnnnnnnnnnnnnnnnnnnnnnnnnnnnnnnnnnnnnnnnnnnnnnnnnnnnnnnnnnnnnnnnnnnnnnnnnnnnnnnnnnnnnnnnnnnnnnnnnnnnnnnnnnnnnnnnnnnnnnnnnnnnnnnnnnnnnnnnnnnnnnnnnnnnnnnnnnnnnnnnnnnnnnnnnnnnnnnnnnnnnnnnnnnnnnnnnnnnnnnnnnnnnnnnnnnnnnnnnnnnnnnnnnnnnnnnnnnnnnnnnnnnnnnnnnnnnnnnnnnnnnnnnnnnnnnnnnnnnnnnnnnnnnnnnnnnnnnnnnnnnnnnnnnnnnnnnnnnnnnnnnnnnnnnnnnnnnnnnnnnnnnnnnnnnnnnnnnnnnnnnnnnnnnnnnnnnnnnnnnnnnnnnnnnnnnnnnnnnnnnnnnnnnnnnnnnnnnnnnnnnnnnnnnnnnnnnnnnnnnnnnnnnnnnnnnnnnnnnnnnnnnnnnnnnnnnnnnnnnnnnnnnnnnnnnnnnnnnnnnnnnnnnnnnnnnnnnnnnnnnnnnnnnnnnnnnnnnnnnnnnnnnnnnnnnnnnnnnnnnnnnnnnnnnnnnnnnnnnnnnnnnnnnnnnnnnnnnnnnnnnnnnnnnnnnnnnnnnnnnnnnnnnnnnnnnnnnnnnnnnnnnnnnnnnnnnnnnnnnnnnnnnnnnnnnnnnnnnnnnnnnnnnnnnnnnnnnnnnnnnnnnnnnnnnnnnnnnnnnnnnnnnnnnnnnnnnnnnnnnnnnnnnnnnnnnnnnnnnnnnnnnnnnnnnnnnnnnnnnnnnnnnnnnnnnnnnnnnnnnnnnnnnnnnnnnnnnnnnnnnnnnnnnnnnnnnnnnnnnnnnnnnnnnnnnnnnnnnnnnnnnnnnnnnnnnnnnnnnnnnnnnnnnnnnnnnnnnnnnnnnnnnnnnnnnnnnnnnnnnnnnnnnnnnnnnnnnnnnnnnnnnnnnnnnnnnnnnnnnnnnnnnnnnnnnnnnnnnnnnnnnnnnnnnnnnnnnnnnnnnnnnnnnnnnnnnnnnnnnnnnnnnnnnnnnnnnnnnnnnnnnnnnnnnnnnnnnnnnnnnnnnnnnnnnnnnnnnnnnnnnnnnnnnnnnnnnnnnnnnnnnnnnnnnnnnnnnnnnnnnnnnnnnnnnnnnnnnnnnnnnnnnnnnnnnnnnnnnnnnnnnnnnnnnnnnnnnnnnnnnnnnnnnnnnnnnnnnnnnnnnnnnnnnnnnnnnnnnnnnnnnnnnnnnnnnnnnnnnnnnnnnnnnnnnnnnnnnnnnnnnnnnnnnnnnnnnnnnnnnnnnnnnnnnnnnnnnnnnnnnnnnnnnnnnnnnnnnnnnnnnnnnnnnnnnnnnnnnnnnnnnnnnnnnnnnnnnnnnnnnnnnnnnnnnnnnnnnnnnnnnnnnnnnnnnnnnnnnnnnnnnnnnnnnnnnnnnnnnnnnnnnnnnnnnnnnnnnnnnnnnnnnnnnnnnnnnnnnnnnnnnnnnnnnnnnnnnnnnnnnnnnnnnnnnnnnnnnnnnnnnnnnnnnnnnnnnnnnnnnnnnnnnnnnnnnnnnnnnnnnnnnnnnnnnnnnnnnnnnnnnnnnnnnnnnnnnnnnnnnnnnnnnnnnnnnnnnnnnnnnnnnnnnnnnnnnnnnnnnnnnnnnnnnnnnnnnnnnnnnnnnnnnnnnnnnnnnnnnnnnnnnnnnnnnnnnnnnnnnnnnnnnnnnnnnnnnnnnnnnnnnnnnnnnnnnnnnnnnnnnnnnnnnnnnnnnnnnnnnnnnnnnnnnnnnnnnnnnnnnnnnnnnnnnnnnnnnnnnnnnnnnnnnnnnnnnnnnnnnnnnnnnnnnnnnnnnnnnnnnnnnnnnnnnnnnnnnnnnnnnnnnnnnnnnnnnnnnnnnnnnnnnnnnnnnnnnnnnnnnnnnnnnnnnnnnnnnnnnnnnnnnnnnnnnnnnnnnnnnnnnnnnnnnnnnnnnnnnnnnnnnnnnnnnnnnnnnnnnnnnnnnnnnnnnnnnnnnnnnnnnnnnnnnnnnnnnnnnnnnnnnnnnnnnnnnnnnnnnnnnnnnnnnnnnnnnnnnnnnnnnnnnnnnnnnnnnnnnnnnnnnnnnnnnnnnnnnnnnnnnnnnnnnnnnnnnnnnnnnnnnnnnnnnnnnnnnnnnnnnnnnnnnnnnnnnnnnnnnnnnnnnnnnnnnnnnnnnnnnnnnnnnnnnnnnnnnnnnnnnnnnnnnnnnnnnnnnnnnnnnnnnnnnnnnnnnnnnnnnnnnnnnnnnnnnnnnnnnnnnnnnnnnnnnnnnnnnnnnnnnnnnnnnnnnnnnnnnnnnnnnnnnnnnnnnnnnnnnnnnnnnnnnnnnnnnnnnnnnnnnnnnnnnnnnnnnnnnnnnnnnnnnnnnnnnnnnnnnnnnnnnnnnnnnnnnnnnnnnnnnnnnnnnnnnnnnnnnnnnnnnnnnnnnnnnnnnnnnnnnnnnnnnnnnnnnnnnnnnnnnnnnnnnnnnnnnnnnnnnnnnnnnnnnnnnnnnnnnnnnnnnnnnnnnnnnnnnnnnnnnnnnnnnnnnnnnnnnnnnnnnnnnnnnnnnnnnnnnnnnnnnnnnnnnnnnnnnnnnnnnnnnnnnnnnnnnnnnnnnnnnnnnnnnnnnnnnnnnnnnnnnnnnnnnnnnnnnnnnnnnnnnnnnnnnnnnnnnnnnnnnnnnnnnnnnnnnnnnnnnnnnnnnnnnnnnnnnnnnnnnnnnnnnnnnnnnnnnnnnnnnnnnnnnnnnnnnnnnnnnnnnnnnnnnnnnnnnnnnnnnnnnnnnnnnnnnnnnnnnnnnnnnnnnnnnnnnnnnnnnnnnnnnnnnnnnnnnnnnnnnnnnnnnnnnnnnnnnnnnnnnnnnnnnnnnnnnnnnnnnnnnnnnnnnnnnnnnnnnnnnnnnnnnnnnnnnnnnnnnnnnnnnnnnnnnnnnnnnnnnnnnnnnnnnnnnnnnnnnnnnnnnnnnnnnnnnnnnnnnnnnnnnnnnnnnnnnnnnnnnnnnnnnnnnnnnnnnnnnnnnnnnnnnnnnnnnnnnnnnnnnnnnnnnnnnnnnnnnnnnnnnnnnnnnnnnnnnnnnnnnnnnnnnnnnnnnnnnnnnnnnnnnnnnnnnnnnnnnnnnnnnnnnnnnnnnnnnnnnnnnnnnnnnnnnnnnnnnnnnnnnnnnnnnnnnnnnnnnnnnnnnnnnnnnnnnnnnnnnnnnnnnnnnnnnnnnnnnnnnnnnnnnnnnnnnnnnnnnnnnnnnnnnnnnnnnnnnnnnnnnnnnnnnnnnnnnnnnnnnnnnnnnnnnnnnnnnnnnnnnnnnnnnnnnnnnnnnnnnnnnnnnnnnnnnnnnnnnnnnnnnnnnnnnnnnnnnnnnnnnnnnnnnnnnnnnnnnnnnnnnnnnnnnnnnnnnnnnnnnnnnnnnnnnnnnnnnnnnnnnnnnnnnnnnnnnnnnnnnnnnnnnnnnnnnnnnnnnnnnnnnnnnnnnnnnnnnnnnnnnnnnnnnnnnnnnnnnnnnnnnnnnnnnnnnnnnnnnnnnnnnnnnnnnnnnnnnnnnnnnnnnnnnnnnnnnnnnnnnnnnnnnnnnnnnnnnnnnnnnnnnnnnnnnnnnnnnnnnnnnnnnnnnnnnnnnnnnnnnnnnnnnnnnnnnnnnnnnnnnnnnnnnnnnnnnnnnnnnnnnnnnnnnnnnnnnnnnnnnnnnnnnnnnnnnnnnnnnnnnnnnnnnnnnnnnnnnnnnnnnnnnnnnnnnnnnnnnnnnnnnnnnnnnnnnnnnnnnnnnnnnnnnnnnnnnnnnnnnnnnnnnnnnnnnnnnnnnnnnnnnnnnnnnnnnnnnnnnnnnnnnnnnnnnnnnnnnnnnnnnnnnnnnnnnnnnnnnnnnnnnnnnnnnnnnnnnnnnnnnnnnnnnnnnnnnnnnnnnnnnnnnnnnnnnnnnnnnnnnnnnnnnnnnnnnnnnnnnnnnnnnnnnnnnnnnnnnnnnnnnnnnnnnnnnnnnnnnnnnnnnnnnnnnnnnnnnnnnnnnnnnnnnnnnnnnnnnnnnnnnnnnnnnnnnnnnnnnnnnnnnnnnnnnnnnnnnnnnnnnnnnnnnnnnnnnnnnnnnnnnnnnnnnnnnnnnnnnnnnnnnnnnnnnnnnnnnnnnnnnnnnnnnnnnnnnnnnnnnnnnnnnnnnnnnnnnnnnnnnnnnnnnnnnnnnnnnnnnnnnnnnnnnnnnnnnnnnnnnnnnnnnnnnnnnnnnnnnnnnnnnnnnnnnnnnnnnnnnnnnnnnnnnnnnnnnnnnnnnnnnnnnnnnnnnnnnnnnnnnnnnnnnnnnnnnnnnnnnnnnnnnnnnnnnnnnnnnnnnnnnnnnnnnnnnnnnnnnnnnnnnnnnnnnnnnnnnnnnnnnnnnnnnnnnnnnnnnnnnnnnnnnnnnnnnnnnnnnnnnnnnnnnnnnnnnnnnnnnnnnnnnnnnnnnnnnnnnnnnnnnnnnnnnnnnnnnnnnnnnnnnnnnnnnnnnnnnnnnnnnnnnnnnnnnnnnnnnnnnnnnnnnnnnnnnnnnnnnnnnnnnnnnnnnnnnnnnnnnnnnnnnnnnnnnnnnnnnnnnnnnnnnnnnnnnnnnnnnnnnnnnnnnnnnnnnnnnnnnnnnnnnnnnnnnnnnnnnnnnnnnnnnnnnnnnnnnnnnnnnnnnnnnnnnnnnnnnnnnnnnnnnnnnnnnnnnnnnnnnnnnnnnnnnnnnnnnnnnnnnnnnnnnnnnnnnnnnnnnnnnnnnnnnnnnnnnnnnnnnnnnnnnnnnnnnnnnnnnnnnnnnnnnnnnnnnnnnnnnnnnnnnnnnnnnnnnnnnnnnnnnnnnnnnnnnnnnnnnnnnnnnnnnnnnnnnnnnnnnnnnnnnnnnnnnnnnnnnnnnnnnnnnnnnnnnnnnnnnnnnnnnnnnnnnnnnnnnnnnnnnnnnnnnnnnnnnnnnnnnnnnnnnnnnnnnnnnnnnnnnnnnnnnnnnnnnnnnnnnnnnnnnnnnnnnnnnnnnnnnnnnnnnnnnnnnnnnnnnnnnnnnnnnnnnnnnnnnnnnnnnnnnnnnnnnnnnnnnnnnnnnnnnnnnnnnnnnnnnnnnnnnnnnnnnnnnnnnnnnnnnnnnnnnnnnnnnnnnnnnnnnnnnnnnnnnnnnnnnnnnnnnnnnnnnnnnnnnnnnnnnnnnnnnnnnnnnnnnnnnnnnnnnnnnnnnnnnnnnnnnnnnnnnnnnnnnnnnnnnnnnnnnnnnnnnnnnnnnnnnnnnnnnnnnnnnnnnnnnnnnnnnnnnnnnnnnnnnnnnnnnnnnnnnnnnnnnnnnnnnnnnnnnnnnnnnnnnnnnnnnnnnnnnnnnnnnnnnnnnnnnnnnnnnnnnnnnnnnnnnnnnnnnnnnnnnnnnnnnnnnnnnnnnnnnnnnnnnnnnnnnnnnnnnnnnnnnnnnnnnnnnnnnnnnnnnnnnnnnnnnnnnnnnnnnnnnnnnnnnnnnnnnnnnnnnnnnnnnnnnnnnnnnnnnnnnnnnnnnnnnnnnnnnnnnnnnnnnnnnnnnnnnnnnnnnnnnnnnnnnnnnnnnnnnnnnnnnnnnnnnnnnnnnnnnnnnnnnnnnnnnnnnnnnnnnnnnnnnnnnnnnnnnnnnnnnnnnnnnnnnnnnnnnnnnnnnnnnnnnnnnnnnnnnnnnnnnnnnnnnnnnnnnnnnnnnnnnnnnnnnnnnnnnnnnnnnnnnnnnnnnnnnnnnnnnnnnnnnnnnnnnnnnnnnnnnnnnnnnnnnnnnnnnnnnnnnnnnnnnnnnnnnnnnnnnnnnnnnnnnnnnnnnnnnnnnnnnnnnnnnnnnnnnnnnnnnnnnnnnnnnnnnnnnnnnnnnnnnnnnnnnnnnnnnnnnnnnnnnnnnnnnnnnnnnnnnnnnnnnnnnnnnnnnnnnnnnnnnnnnnnnnnnnnnnnnnnnnnnnnnnnnnnnnnnnnnnnnnnnnnnnnnnnnnnnnnnnnnnnnnnnnnnnnnnnnnnnnnnnnnnnnnnnnnnnnnnnnnnnnnnnnnnnnnnnnnnnnnnnnnnnnnnnnnnnnnnnnnnnnnnnnnnnnnnnnnnnnnnnnnnnnnnnnnnnnnnnnnnnnnnnnnnnnnnnnnnnnnnnnnnnnnnnnnnnnnnnnnnnnnnnnnnnnnnnnnnnnnnnnnnnnnnnnnnnnnnnnnnnnnnnnnnnnnnnnnnnnnnnnnnnnnnnnnnnnnnnnnnnnnnnnnnnnnnnnnnnnnnnnnnnnnnnnnnnnnnnnnnnnnnnnnnnnnnnnnnnnnnnnnnnnnnnnnnnnnnnnnnnnnnnnnnnnnnnnnnnnnnnnnnnnnnnnnnnnnnnnnnnnnnnnnnnnnnnnnnnnnnnnnnnnnnnnnnnnnnnnnnnnnnnnnnnnnnnnnnnnnnnnnnnnnnnnnnnnnnnnnnnnnnnnnnnnnnnnnnnnnnnnnnnnnnnnnnnnnnnnnnnnnnnnnnnnnnnnnnnnnnnnnnnnnnnnnnnnnnnnnnnnnnnnnnnnnnnnnnnnnnnnnnnnnnnnnnnnnnnnnnnnnnnnnnnnnnnnnnnnnnnnnnnnnnnnnnnnnnnnnnnnnnnnnnnnnnnnnnnnnnnnnnnnnnnnnnnnnnnnnnnnnnnnnnnnnnnnnnnnnnnnnnnnnnnnnnnnnnnnnnnnnnnnnnnnnnnnnnnnnnnnnnnnnnnnnnnnnnnnnnnnnnnnnnnnnnnnnnnnnnnnnnnnnnnnnnnnnnnnnnnnnnnnnnnnnnnnnnnnnnnnnnnnnnnnnnnnnnnnnnnnnnnnnnnnnnnnnnnnnnnnnnnnnnnnnnnnnnnnnnnnnnnnnnnnnnnnnnnnnnnnnnnnnnnnnnnnnnnnnnnnnnnnnnnnnnnnnnnnnnnnnnnnnnnnnnnnnnnnnnnnnnnnnnnnnnnnnnnnnnnnnnnnnnnnnnnnnnnnnnnnnnnnnnnnnnnnnnnnnnnnnnnnnnnnnnnnnnnnnnnnnnnnnnnnnnnnnnnnnnnnnnnnnnnnnnnnnnnnnnnnnnnnnnnnnnnnnnnnnnnnnnnnnnnnnnnnnnnnnnnnnnnnnnnnnnnnnnnnnnnnnnnnnnnnnnnnnnnnnnnnnnnnnnnnnnnnnnnnnnnnnnnnnnnnnnnnnnnnnnnnnnnnnnnnnnnnnnnnnnnnnnnnnnnnnnnnnnnnnnnnnnnnnnnnnnnnnnnnnnnnnnnnnnnnnnnnnnnnnnnnnnnnnnnnnnnnnnnnnnnnnnnnnnnnnnnnnnnnnnnnnnnnnnnnnnnnnnnnnnnnnnnnnnnnnnnnnnnnnnnnnnnnnnnnnnnnnnnnnnnnnnnnnnnnnnnnnnnnnnnnnnnnnnnnnnnnnnnnnnnnnnnnnnnnnnnnnnnnnnnnnnnnnnnnnnnnnnnnnnnnnnnnnnnnnnnnnnnnnnnnnnnnnnnnnnnnnnnnnnnnnnnnnnnnnnnnnnnnnnnnnnnnnnnnnnnnnnnnnnnnnnnnnnnnnnnnnnnnnnnnnnnnnnnnnnnnnnnnnnnnnnnnnnnnnnnnnnnnnnnnnnnnnnnnnnnnnnnnnnnnnnnnnnnnnnnnnnnnnnnnnnnnnnnnnnnnnnnnnnnnnnnnnnnnnnnnnnnnnnnnnnnnnnnnnnnnnnnnnnnnnnnnnnnnnnnnnnnnnnnnnnnnnnnnnnnnnnnnnnnnnnnnnnnnnnnnnnnnnnnnnnnnnnnnnnnnnnnnnnnnnnnnnnnnnnnnnnnnnnnnnnnnnnnnnnnnnnnnnnnnnnnnnnnnnnnnnnnnnnnnnnnnnnnnnnnnnnnnnnnnnnnnnnnnnnnnnnnnnnnnnnnnnnnnnnnnnnnnnnnnnnnnnnnnnnnnnnnnnnnnnnnnnnnnnnnnnnnnnnnnnnnnnnnnnnnnnnnnnnnnnnnnnnnnnnnnnnnnnnnnnnnnnnnnnnnnnnnnnnnnnnnnnnnnnnnnnnnnnnnnnnnnnnnnnnnnnnnnnnnnnnnnnnnnnnnnnnnnnnnnnnnnnnnnnnnnnnnnnnnnnnnnnnnnnnnnnnnnnnnnnnnnnnnnnnnnnnnnnnnnnnnnnnnnnnnnnnnnnnnnnnnnnnnnnnnnnnnnnnnnnnnnnnnnnnnnnnnnnnnnnnnnnnnnnnnnnnnnnnnnnnnnnnnnnnnnnnnnnnnnnnnnnnnnnnnnnnnnnnnnnnnnnnnnnnnnnnnnnnnnnnnnnnnnnnnnnnnnnnnnnnnnnnnnnnnnnnnnnnnnnnnnnnnnnnnnnnnnnnnnnnnnnnnnnnnnnnnnnnnnnnnnnnnnnnnnnnnnnnnnnnnnnnnnnnnnnnnnnnnnnnnnnnnnnnnnnnnnnnnnnnnnnnnnnnnnnnnnnnnnnnnnnnnnnnnnnnnnnnnnnnnnnnnnnnnnnnnnnnnnnnnnnnnnnnnnnnnnnnnnnnnnnnnnnnnnnnnnnnnnnnnnnnnnnnnnnnnnnnnnnnnnnnnnnnnnnnnnnnnnnnnnnnnnnnnnnnnnnnnnnnnnnnnnnnnnnnnnnnnnnnnnnnnnnnnnnnnnnnnnnnnnnnnnnnnnnnnnnnnnnnnnnnnnnnnnnnnnnnnnnnnnnnnnnnnnnnnnnnnnnnnnnnnnnnnnnnnnnnnnnnnnnnnnnnnnnnnnnnnnnnnnnnnnnnnnnnnnnnnnnnnnnnnnnnnnnnnnnnnnnnnnnnnnnnnnnnnnnnnnnnnnnnnnnnnnnnnnnnnnnnnnnnnnnnnnnnnnnnnnnnnnnnnnnnnnnnnnnnnnnnnnnnnnnnnnnnnnnnnnnnnnnnnnnnnnnnnnnnnnnnnnnnnnnnnnnnnnnnnnnnnnnnnnnnnnnnnnnnnnnnnnnnnnnnnnnnnnnnnnnnnnnnnnnnnnnnnnnnnnnnnnnnnnnnnnnnnnnnnnnnnnnnnnnnnnnnnnnnnnnnnnnnnnnnnnnnnnnnnnnnnnnnnnnnnnnnnnnnnnnnnnnnnnnnnnnnnnnnnnnnnnnnnnnnnnnnnnnnnnnnnnnnnnnnnnnnnnnnnnnnnnnnnnnnnnnnnnnnnnnnnnnnnnnnnnnnnnnnnnnnnnnnnnnnnnnnnnnnnnnnnnnnnnnnnnnnnnnnnnnnnnnnnnnnnnnnnnnnnnnnnnnnnnnnnnnnnnnnnnnnnnnnnnnnnnnnnnnnnnnnnnnnnnnnnnnnnnnnnnnnnnnnnnnnnnnnnnnnnnnnnnnnnnnnnnnnnnnnnnnnnnnnnnnnnnnnnnnnnnnnnnnnnnnnnnnnnnnnnnnnnnnnnnnnnnnnnnnnnnnnnnnnnnnnnnnnnnnnnnnnnnnnnnnnnnnnnnnnnnnnnnnnnnnnnnnnnnnnnnnnnnnnnnnnnnnnnnnnnnnnnnnnnnnnnnnnnnnnnnnnnnnnnnnnnnnnnnnnnnnnnnnnnnnnnnnnnnnnnnnnnnnnnnnnnnnnnnnnnnnnnnnnnnnnnnnnnnnnnnnnnnnnnnnnnnnnnnnnnnnnnnnnnnnnnnnnnnnnnnnnnnnnnnnnnnnnnnnnnnnnnnnnnnnnnnnnnnnnnnnnnnnnnnnnnnnnnnnnnnnnnnnnnnnnnnnnnnnnnnnnnnnnnnnnnnnnnnnnnnnnnnnnnnnnnnnnnnnnnnnnnnnnnnnnnnnnnnnnnnnnnnnnnnnnnnnnnnnnnnnnnnnnnnnnnnnnnnnnnnnnnnnnnnnnnnnnnnnnnnnnnnnnnnnnnnnnnnnnnnnnnnnnnnnnnnnnnnnnnnnnnnnnnnnnnnnnnnnnnnnnnnnnnnnnnnnnnnnnnnnnnnnnnnnnnnnnnnnnnnnnnnnnnnnnnnnnnnnnnnnnnnnnnnnnnnnnnnnnnnnnnnnnnnnnnnnnnnnnnnnnnnnnnnnnnnnnnnnnnnnnnnnnnnnnnnnnnnnnnnnnnnnnnnnnnnnnnnnnnnnnnnnnnnnnnnnnnnnnnnnnnnnnnnnnnnnnnnnnnnnnnnnnnnnnnnnnnnnnnnnnnnnnnnnnnnnnnnnnnnnnnnnnnnnnnnnnnnnnnnnnnnnnnnnnnnnnnnnnnnnnnnnnnnnnnnnnnnnnnnnnnnnnnnnnnnnnnnnnnnnnnnnnnnnnnnnnnnnnnnnnnnnnnnnnnnnnnnnnnnnnnnnnnnnnnnnnnnnnnnnnnnnnnnnnnnnnnnnnnnnnnnnnnnnnnnnnnnnnnnnnnnnnnnnnnnnnnnnnnnnnnnnnnnnnnnnnnnnnnnnnnnnnnnnnnnnnnnnnnnnnnnnnnnnnnnnnnnnnnnnnnnnnnnnnnnnnnnnnnnnnnnnnnnnnnnnnnnnnnnnnnnnnnnnnnnnnnnnnnnnnnnnnnnnnnnnnnnnnnnnnnnnnnnnnnnnnnnnnnnnnnnnnnnnnnnnnnnnnnnnnnnnnnnnnnnnnnnnnnnnnnnnnnnnnnnnnnnnnnnnnnnnnnnnnnnnnnnnnnnnnnnnnnnnnnnnnnnnnnnnnnnnnnnnnnnnnnnnnnnnnnnnnnnnnnnnnnnnnnnnnnnnnnnnnnnnnnnnnnnnnnnnnnnnnnnnnnnnnnnnnnnnnnnnnnnnnnnnnnnnnnnnnnnnnnnnnnnnnnnnnnnnnnnnnnnnnnnnnnnnnnnnnnnnnnnnnnnnnnnnnnnnnnnnnnnnnnnnnnnnnnnnnnnnnnnnnnnnnnnnnnnnnnnnnnnnnnnnnnnnnnnnnnnnnnnnnnnnnnnnnnnnnnnnnnnnnnnnnnnnnnnnnnnnnnnnnnnnnnnnnnnnnnnnnnnnnnnnnnnnnnnnnnnnnnnnnnnnnnnnnnnnnnnnnnnnnnnnnnnnnnnnnnnnnnnnnnnnnnnnnnnnnnnnnnnnnnnnnnnnnnnnnnnnnnnnnnnnnnnnnnnnnnnnnnnnnnnnnnnnnnnnnnnnnnnnnnnnnnnnnnnnnnnnnnnnnnnnnnnnnnnnnnnnnnnnnnnnnnnnnnnnnnnnnnnnnnnnnnnnnnnnnnnnnnnnnnnnnnnnnnnnnnnnnnnnnnnnnnnnnnnnnnnnnnnnnnnnnnnnnnnnnnnnnnnnnnnnnnnnnnnnnnnnnnnnnnnnnnnnnnnnnnnnnnnnnnnnnnnnnnnnnnnnnnnnnnnnnnnnnnnnnnnnnnnnnnnnnnnnnnnnnnnnnnnnnnnnnnnnnnnnnnnnnnnnnnnnnnnnnnnnnnnnnnnnnnnnnnnnnnnnnnnnnnnnnnnnnnnnnnnnnnnnnnnnnnnnnnnnnnnnnnnnnnnnnnnnnnnnnnnnnnnnnnnnnnnnnnnnnnnnnnnnnnnnnnnnnnnnnnnnnnnnnnnnnnnnnnnnnnnnnnnnnnnnnnnnnnnnnnnnnnnnnnnnnnnnnnnnnnnnnnnnnnnnnnnnnnnnnnnnnnnnnnnnnnnnnnnnnnnnnnnnnnnnnnnnnnnnnnnnnnnnnnnnnnnnnnnnnnnnnnnnnnnnnnnnnnnnnnnnnnnnnnnnnnnnnnnnnnnnnnnnnnnnnnnnnnnnnnnnnnnnnnnnnnnnnnnnnnnnnnnnnnnnnnnnnnnnnnnnnnnnnnnnnnnnnnnnnnnnnnnnnnnnnnnnnnnnnnnnnnnnnnnnnnnnnnnnnnnnnnnnnnnnnnnnnnnnnnnnnnnnnnnnnnnnnnnnnnnnnnnnnnnnnnnnnnnnnnnnnnnnnnnnnnnnnnnnnnnnnnnnnnnnnnnnnnnnnnnnnnnnnnnnnnnnnnnnnnnnnnnnnnnnnnnnnnnnnnnnnnnnnnnnnnnnnnnnnnnnnnnnnnnnnnnnnnnnnnnnnnnnnnnnnnnnnnnnnnnnnnnnnnnnnnnnnnnnnnnnnnnnnnnnnnnnnnnnnnnnnnnnnnnnnnnnnnnnnnnnnnnnnnnnnnnnnnnnnnnnnnnnnnnnnnnnnnnnnnnnnnnnnnnnnnnnnnnnnnnnnnnnnnnnnnnnnnnnnnnnnnnnnnnnnnnnnnnnnnnnnnnnnnnnnnnnnnnnnnnnnnnnnnnnnnnnnnnnnnnnnnnnnnnnnnnnnnnnnnnnnnnnnnnnnnnnnnnnnnnnnnnnnnnnnnnnnnnnnnnnnnnnnnnnnnnnnnnnnnnnnnnnnnnnnnnnnnnnnnnnnnnnnnnnnnnnnnnnnnnnnnnnnnnnnnnnnnnnnnnnnnnnnnnnnnnnnnnnnnnnnnnnnnnnnnnnnnnnnnnnnnnnnnnnnnnnnnnnnnnnnnnnnnnnnnnnnnnnnnnnnnnnnnnnnnnnnnnnnnnnnnnnnnnnnnnnnnnnnnnnnnnnnnnnnnnnnnnnnnnnnnnnnnnnnnnnnnnnnnnnnnnnnnnnnnnnnnnnnnnnnnnnnnnnnnnnnnnnnnnnnnnnnnnnnnnnnnnnnnnnnnnnnnnnnnnnnnnnnnnnnnnnnnnnnnnnnnnnnnnnnnnnnnnnnnnnnnnnnnnnnnnnnnnnnnnnnnnnnnnnnnnnnnnnnnnnnnnnnnnnnnnnnnnnnnnnnnnnnnnnnnnnnnnnnnnnnnnnnnnnnnnnnnnnnnnnnnnnnnnnnnnnnnnnnnnnnnnnnnnnnnnnnnnnnnnnnnnnnnnnnnnnnnnnnnnnnnnnnnnnnnnnnnnnnnnnnnnnnnnnnnnnnnnnnnnnnnnnnnnnnnnnnnnnnnnnnnnnnnnnnnnnnnnnnnnnnnnnnnnnnnnnnnnnnnnnnnnnnnnnnnnnnnnnnnnnnnnnnnnnnnnnnnnnnnnnnnnnnnnnnnnnnnnnnnnnnnnnnnnnnnnnnnnnnnnnnnnnnnnnnnnnnnnnnnnnnnnnnnnnnnnnnnnnnnnnnnnnnnnnnnnnnnnnnnnnnnnnnnnnnnnnnnnnnnnnnnnnnnnnnnnnnnnnnnnnnnnnnnnnnnnnnnnnnnnnnnnnnnnnnnnnnnnnnnnnnnnnnnnnnnnnnnnnnnnnnnnnnnnnnnnnnnnnnnnnnnnnnnnnnnnnnnnnnnnnnnnnnnnnnnnnnnnnnnnnnnnnnnnnnnnnnnnnnnnnnnnnnnnnnnnnnnnnnnnnnnnnnnnnnnnnnnnnnnnnnnnnnnnnnnnnnnnnnnnnnnnnnnnnnnnnnnnnnnnnnnnnnnnnnnnnnnnnnnnnnnnnnnnnnnnnnnnnnnnnnnnnnnnnnnnnnnnnnnnnnnnnnnnnnnnnnnnnnnnnnnnnnnnnnnnnnnnnnnnnnnnnnnnnnnnnnnnnnnnnnnnnnnnnnnnnnnnnnnnnnnnnnnnnnnnnnnnnnnnnnnnnnnnnnnnnnnnnnnnnnnnnnnnnnnnnnnnnnnnnnnnnnnnnnnnnnnnnnnnnnnnnnnnnnnnnnnnnnnnnnnnnnnnnnnnnnnnnnnnnnnnnnnnnnnnnnnnnnnnnnnnnnnnnnnnnnnnnnnnnnnnnnnnnnnnnnnnnnnnnnnnnnnnnnnnnnnnnnnnnnnnnnnnnnnnnnnnnnnnnnnnnnnnnnnnnnnnnnnnnnnnnnnnnnnnnnnnnnnnnnnnnnnnnnnnnnnnnnnnnnnnnnnnnnnnnnnnnnnnnnnnnnnnnnnnnnnnnnnnnnnnnnnnnnnnnnnnnnnnnnnnnnnnnnnnnnnnnnnnnnnnnnnnnnnnnnnnnnnnnnnnnnnnnnnnnnnnnnnnnnnnnnnnnnnnnnnnnnnnnnnnnnnnnnnnnnnnnnnnnnnnnnnnnnnnnnnnnnnnnnnnnnnnnnnnnnnnnnnnnnnnnnnnnnnnnnnnnnnnnnnnnnnnnnnnnnnnnnnnnnnnnnnnnnnnnnnnnnnnnnnnnnnnnnnnnnnnnnnnnnnnnnnnnnnnnnnnnnnnnnnnnnnnnnnnnnnnnnnnnnnnnnnnnnnnnnnnnnnnnnnnnnnnnnnnnnnnnnnnnnnnnnnnnnnnnnnnnnnnnnnnnnnnnnnnnnnnnnnnnnnnnnnnnnnnnnnnnnnnnnnnnnnnnnnnnnnnnnnnnnnnnnnnnnnnnnnnnnnnnnnnnnnnnnnnnnnnnnnnnnnnnnnnnnnnnnnnnnnnnnnnnnnnnnnnnnnnnnnnnnnnnnnnnnnnnnnnnnnnnnnnnnnnnnnnnnnnnnnnnnnnnnnnnnnnnnnnnnnnnnnnnnnnnnnnnnnnnnnnnnnnnnnnnnnnnnnnnnnnnnnnnnnnnnnnnnnnnnnnnnnnnnnnnnnnnnnnnnnnnnnnnnnnnnnnnnnnnnnnnnnnnnnnnnnnnnnnnnnnnnnnnnnnnnnnnnnnnnnnnnnnnnnnnnnnnnnnnnnnnnnnnnnnnnnnnnnnnnnnnnnnnnnnnnnnnnnnnnnnnnnnnnnnnnnnnnnnnnnnnnnnnnnnnnnnnnnnnnnnnnnnnnnnnnnnnnnnnnnnnnnnnnnnnnnnnnnnnnnnnnnnnnnnnnnnnnnnnnnnnnnnnnnnnnnnnnnnnnnnnnnnnnnnnnnnnnnnnnnnnnnnnnnnnnnnnnnnnnnnnnnnnnnnnnnnnnnnnnnnnnnnnnnnnnnnnnnnnnnnnnnnnnnnnnnnnnnnnnnnnnnnnnnnnnnnnnnnnnnnnnnnnnnnnnnnnnnnnnnnnnnnnnnnnnnnnnnnnnnnnnnnnnnnnnnnnnnnnnnnnnnnnnnnnnnnnnnnnnnnnnnnnnnnnnnnnnnnnnnnnnnnnnnnnnnnnnnnnnnnnnnnnnnnnnnnnnnnnnnnnnnnnnnnnnnnnnnnnnnnnnnnnnnnnnnnnnnnnnnnnnnnnnnnnnnnnnnnnnnnnnnnnnnnnnnnnnnnnnnnnnnnnnnnnnnnnnnnnnnnnnnnnnnnnnnnnnnnnnnnnnnnnnnnnnnnnnnnnnnnnnnnnnnnnnnnnnnnnnnnnnnnnnnnnnnnnnnnnnnnnnnnnnnnnnnnnnnnnnnnnnnnnnnnnnnnnnnnnnnnnnnnnnnnnnnnnnnnnnnnnnnnnnnnnnnnnnnnnnnnnnnnnnnnnnnnnnnnnnnnnnnnnnnnnnnnnnnnnnnnnnnnnnnnnnnnnnnnnnnnnnnnnnnnnnnnnnnnnnnnnnnnnnnnnnnnnnnnnnnnnnnnnnnnnnnnnnnnnnnnnnnnnnnnnnnnnnnnnnnnnnnnnnnnnnnnnnnnnnnnnnnnnnnnnnnnnnnnnnnnnnnnnnnnnnnnnnnnnnnnnnnnnnnnnnnnnnnnnnnnnnnnnnnnnnnnnnnnnnnnnnnnnnnnnnnnnnnnnnnnnnnnnnnnnnnnnnnnnnnnnnnnnnnnnnnnnnnnnnnnnnnnnnnnnnnnnnnnnnnnnnnnnnnnnnnnnnnnnnnnnnnnnnnnnnnnnnnnnnnnnnnnnnnnnnnnnnnnnnnnnnnnnnnnnnnnnnnnnnnnnnnnnnnnnnnnnnnnnnnnnnnnnnnnnnnnnnnnnnnnnnnnnnnnnnnnnnnnnnnnnnnnnnnnnnnnnnnnnnnnnnnnnnnnnnnnnnnnnnnnnnnnnnnnnnnnnnnnnnnnnnnnnnnnnnnnnnnnnnnnnnnnnnnnnnnnnnnnnnnnnnnnnnnnnnnnnnnnnnnnnnnnnnnnnnnnnnnnnnnnnnnnnnnnnnnnnnnnnnnnnnnnnnnnnnnnnnnnnnnnnnnnnnnnnnnnnnnnnnnnnnnnnnnnnnnnnnnnnnnnnnnnnnnnnnnnnnnnnnnnnnnnnnnnnnnnnnnnnnnnnnnnnnnnnnnnnnnnnnnnnnnnnnnnnnnnnnnnnnnnnnnnnnnnnnnnnnnnnnnnnnnnnnnnnnnnnnnnnnnnnnnnnnnnnnnnnnnnnnnnnnnnnnnnnnnnnnnnnnnnnnnnnnnnnnnnnnnnnnnnnnnnnnnnnnnnnnnnnnnnnnnnnnnnnnnnnnnnnnnnnnnnnnnnnnnnnnnnnnnnnnnnnnnnnnnnnnnnnnnnnnnnnnnnnnnnnnnnnnnnnnnnnnnnnnnnnnnnnnnnnnnnnnnnnnnnnnnnnnnnnnnnnnnnnnnnnnnnnnnnnnnnnnnnnnnnnnnnnnnnnnnnnnnnnnnnnnnnnnnnnnnnnnnnnnnnnnnnnnnnnnnnnnnnnnnnnnnnnnnnnnnnnnnnnnnnnnnnnnnnnnnnnnnnnnnnnnnnnnnnnnnnnnnnnnnnnnnnnnnnnnnnnnnnnnnnnnnnnnnnnnnnnnnnnnnnnnnnnnnnnnnnnnnnnnnnnnnnnnnnnnnnnnnnnnnnnnnnnnnnnnnnnnnnnnnnnnnnnnnnnnnnnnnnnnnnnnnnnnnnnnnnnnnnnnnnnnnnnnnnnnnnnnnnnnnnnnnnnnnnnnnnnnnnnnnnnnnnnnnnnnnnnnnnnnnnnnnnnnnnnnnnnnnnnnnnnnnnnnnnnnnnnnnnnnnnnnnnnnnnnnnnnnnnnnnnnnnnnnnnnnnnnnnnnnnnnnnnnnnnnnnnnnnnnnnnnnnnnnnnnnnnnnnnnnnnnnnnnnnnnnnnnnnnnnnnnnnnnnnnnnnnnnnnnnnnnnnnnnnnnnnnnnnnnnnnnnnnnnnnnnnnnnnnnnnnnnnnnnnnnnnnnnnnnnnnnnnnnnnnnnnnnnnnnnnnnnnnnnnnnnnnnnnnnnnnnnnnnnnnnnnnnnnnnnnnnnnnnnnnnnnnnnnnnnnnnnnnnnnnnnnnnnnnnnnnnnnnnnnnnnnnnnnnnnnnnnnnnnnnnnnnnnnnnnnnnnnnnnnnnnnnnnnnnnnnnnnnnnnnnnnnnnnnnnnnnnnnnnnnnnnnnnnnnnnnnnnnnnnnnnnnnnnnnnnnnnnnnnnnnnnnnnnnnnnnnnnnnnnnnnnnnnnnnnnnnnnnnnnnnnnnnnnnnnnnnnnnnnnnnnnnnnnnnnnnnnnnnnnnnnnnnnnnnnnnnnnnnnnnnnnnnnnnnnnnnnnnnnnnnnnnnnnnnnnnnnnnnnnnnnnnnnnnnnnnnnnnnnnnnnnnnnnnnnnnnnnnnnnnnnnnnnnnnnnnnnnnnnnnnnnnnnnnnnnnnnnnnnnnnnnnnnnnnnnnnnnnnnnnnnnnnnnnnnnnnnnnnnnnnnnnnnnnnnnnnnnnnnnnnnnnnnnnnnnnnnnnnnnnnnnnnnnnnnnnnnnnnnnnnnnnnnnnnnnnnnnnnnnnnnnnnnnnnnnnnnnnnnnnnnnnnnnnnnnnnnnnnnnnnnnnnnnnnnnnnnnnnnnnnnnnnnnnnnnnnnnnnnnnnnnnnnnnnnnnnnnnnnnnnnnnnnnnnnnnnnnnnnnnnnnnnnnnnnnnnnnnnnnnnnnnnnnnnnnnnnnnnnnnnnnnnnnnnnnnnnnnnnnnnnnnnnnnnnnnnnnnnnnnnnnnnnnnnnnnnnnnnnnnnnnnnnnnnnnnnnnnnnnnnnnnnnnnnnnnnnnnnnnnnnnnnnnnnnnnnnnnnnnnnnnnnnnnnnnnnnnnnnnnnnnnnnnnnnnnnnnnnnnnnnnnnnnnnnnnnnnnnnnnnnnnnnnnnnnnnnnnnnnnnnnnnnnnnnnnnnnnnnnnnnnnnnnnnnnnnnnnnnnnnnnnnnnnnnnnnnnnnnnnnnnnnnnnnnnnnnnnnnnnnnnnnnnnnnnnnnnnnnnnnnnnnnnnnnnnnnnnnnnnnnnnnnnnnnnnnnnnnnnnnnnnnnnnnnnnnnnnnnnnnnnnnnnnnnnnnnnnnnnnnnnnnnnnnnnnnnnnnnnnnnnnnnnnnnnnnnnnnnnnnnnnnnnnnnnnnnnnnnnnnnnnnnnnnnnnnnnnnnnnnnnnnnnnnnnnnnnnnnnnnnnnnnnnnnnnnnnnnnnnnnnnnnnnnnnnnnnnnnnnnnnnnnnnnnnnnnnnnnnnnnnnnnnnnnnnnnnnnnnnnnnnnnnnnnnnnnnnnnnnnnnnnnnnnnnnnnnnnnnnnnnnnnnnnnnnnnnnnnnnnnnnnnnnnnnnnnnnnnnnnnnnnnnnnnnnnnnnnnnnnnnnnnnnnnnnnnnnnnnnnnnnnnnnnnnnnnnnnnnnnnnnnnnnnnnnnnnnnnnnnnnnnnnnnnnnnnnnnnnnnnnnnnnnnnnnnnnnnnnnnnnnnnnnnnnnnnnnnnnnnnnnnnnnnnnnnnnnnnnnnnnnnnnnnnnnnnnnnnnnnnnnnnnnnnnnnnnnnnnnnnnnnnnnnnnnnnnnnnnnnnnnnnnnnnnnnnnnnnnnnnnnnnnnnnnnnnnnnnnnnnnnnnnnnnnnnnnnnnnnnnnnnnnnnnnnnnnnnnnnnnnnnnnnnnnnnnnnnnnnnnnnnnnnnnnnnnnnnnnnnnnnnnnnnnnnnnnnnnnnnnnnnnnnnnnnnnnnnnnnnnnnnnnnnnnnnnnnnnnnnnnnnnnnnnnnnnnnnnnnnnnnnnnnnnnnnnnnnnnnnnnnnnnnnnnnnnnnnnnnnnnnnnnnnnnnnnnnnnnnnnnnnnnnnnnnnnnnnnnnnnnnnnnnnnnnnnnnnnnnnnnnnnnnnnnnnnnnnnnnnnnnnnnnnnnnnnnnnnnnnnnnnnnnnnnnnnnnnnnnnnnnnnnnnnnnnnnnnnnnnnnnnnnnnnnnnnnnnnnnnnnnnnnnnnnnnnnnnnnnnnnnnnnnnnnnnnnnnnnnnnnnnnnnnnnnnnnnnnnnnnnnnnnnnnnnnnnnnnnnnnnnnnnnnnnnnnnnnnnnnnnnnnnnnnnnnnnnnnnnnnnnnnnnnnnnnnnnnnnnnnnnnnnnnnnnnnnnnnnnnnnnnnnnnnnnnnnnnnnnnnnnnnnnnnnnnnnnnnnnnnnnnnnnnnnnnnnnnnnnnnnnnnnnnnnnnnnnnnnnnnnnnnnnnnnnnnnnnnnnnnnnnnnnnnnnnnnnnnnnnnnnnnnnnnnnnnnnnnnnnnnnnnnnnnnnnnnnnnnnnnnnnnnnnnnnnnnnnnnnnnnnnnnnnnnnnnnnnnnnnnnnnnnnnnnnnnnnnnnnnnnnnnnnnnnnnnnnnnnnnnnnnnnnnnnnnnnnnnnnnnnnnnnnnnnnnnnnnnnnnnnnnnnnnnnnnnnnnnnnnnnnnnnnnnnnnnnnnnnnnnnnnnnnnnnnnnnnnnnnnnnnnnnnnnnnnnnnnnnnnnnnnnnnnnnnnnnnnnnnnnnnnnnnnnnnnnnnnnnnnnnnnnnnnnnnnnnnnnnnnnnnnnnnnnnnnnnnnnnnnnnnnnnnnnnnnnnnnnnnnnnnnnnnnnnnnnnnnnnnnnnnnnnnnnnnnnnnnnnnnnnnnnnnnnnnnnnnnnnnnnnnnnnnnnnnnnnnnnnnnnnnnnnnnnnnnnnnnnnnnnnnnnnnnnnnnnnnnnnnnnnnnnnnnnnnnnnnnnnnnnnnnnnnnnnnnnnnnnnnnnnnnnnnnnnnnnnnnnnnnnnnnnnnnnnnnnnnnnnnnnnnnnnnnnnnnnnnnnnnnnnnnnnnnnnnnnnnnnnnnnnnnnnnnnnnnnnnnnnnnnnnnnnnnnnnnnnnnnnnnnnnnnnnnnnnnnnnnnnnnnnnnnnnnnnnnnnnnnnnnnnnnnnnnnnnnnnnnnnnnnnnnnnnnnnnnnnnnnnnnnnnnnnnnnnnnnnnnnnnnnnnnnnnnnnnnnnnnnnnnnnnnnnnnnnnnnnnnnnnnnnnnnnnnnnnnnnnnnnnnnnnnnnnnnnnnnnnnnnnnnnnnnnnnnnnnnnnnnnnnnnnnnnnnnnnnnnnnnnnnnnnnnnnnnnnnnnnnnnnnnnnnnnnnnnnnnnnnnnnnnnnnnnnnnnnnnnnnnnnnnnnnnnnnnnnnnnnnnnnnnnnnnnnnnnnnnnnnnnnnnnnnnnnnnnnnnnnnnnnnnnnnnnnnnnnnnnnnnnnnnnnnnnnnnnnnnnnnnnnnnnnnnnnnnnnnnnnnnnnnnnnnnnnnnnnnnnnnnnnnnnnnnnnnnnnnnnnnnnnnnnnnnnnnnnnnnnnnnnnnnnnnnnnnnnnnnnnnnnnnnnnnnnnnnnnnnnnnnnnnnnnnnnnnnnnnnnnnnnnnnnnnnnnnnnnnnnnnnnnnnnnnnnnnnnnnnnnnnnnnnnnnnnnnnnnnnnnnnnnnnnnnnnnnnnnnnnnnnnnnnnnnnnnnnnnnnnnnnnnnnnnnnnnnnnnnnnnnnnnnnnnnnnnnnnnnnnnnnnnnnnnnnnnnnnnnnnnnnnnnnnnnnnnnnnnnnnnnnnnnnnnnnnnnnnnnnnnnnnnnnnnnnnnnnnnnnnnnnnnnnnnnnnnnnnnnnnnnnnnnnnnnnnnnnnnnnnnnnnnnnnnnnnnnnnnnnnnnnnnnnnnnnnnnnnnnnnnnnnnnnnnnnnnnnnnnnnnnnnnnnnnnnnnnnnnnnnnnnnnnnnnnnnnnnnnnnnnnnnnnnnnnnnnnnnnnnnnnnnnnnnnnnnnnnnnnnnnnnnnnnnnnnnnnnnnnnnnnnnnnnnnnnnnnnnnnnnnnnnnnnnnnnnnnnnnnnnnnnnnnnnnnnnnnnnnnnnnnnnnnnnnnnnnnnnnnnnnnnnnnnnnnnnnnnnnnnnnnnnnnnnnnnnnnnnnnnnnnnnnnnnnnnnnnnnnnnnnnnnnnnnnnnnnnnnnnnnnnnnnnnnnnnnnnnnnnnnnnnnnnnnnnnnnnnnnnnnnnnnnnnnnnnnnnnnnnnnnnnnnnnnnnnnnnnnnnnnnnnnnnnnnnnnnnnnnnnnnnnnnnnnnnnnnnnnnnnnnnnnnnnnnnnnnnnnnnnnnnnnnnnnnnnnnnnnnnnnnnnnnnnnnnnnnnnnnnnnnnnnnnnnnnnnnnnnnnnnnnnnnnnnnnnnnnnnnnnnnnnnnnnnnnnnnnnnnnnnnnnnnnnnnnnnnnnnnnnnnnnnnnnnnnnnnnnnnnnnnnnnnnnnnnnnnnnnnnnnnnnnnnnnnnnnnnnnnnnnnnnnnnnnnnnnnnnnnnnnnnnnnnnnnnnnnnnnnnnnnnnnnnnnnnnnnnnnnnnnnnnnnnnnnnnnnnnnnnnnnnnnnnnnnnnnnnnnnnnnnnnnnnnnnnnnnnnnnnnnnnnnnnnnnnnnnnnnnnnnnnnnnnnnnnnnnnnnnnnnnnnnnnnnnnnnnnnnnnnnnnnnnnnnnnnnnnnnnnnnnnnnnnnnnnnnnnnnnnnnnnnnnnnnnnnnnnnnnnnnnnnnnnnnnnnnnnnnnnnnnnnnnnnnnnnnnnnnnnnnnnnnnnnnnnnnnnnnnnnnnnnnnnnnnnnnnnnnnnnnnnnnnnnnnnnnnnnnnnnnnnnnnnnnnnnnnnnnnnnnnnnnnnnnnnnnnnnnnnnnnnnnnnnnnnnnnnnnnnnnnnnnnnnnnnnnnnnnnnnnnnnnnnnnnnnnnnnnnnnnnnnnnnnnnnnnnnnnnnnnnnnnnnnnnnnnnnnnnnnnnnnnnnnnnnnnnnnnnnnnnnnnnnnnnnnnnnnnnnnnnnnnnnnnnnnnnnnnnnnnnnnnnnnnnnnnnnnnnnnnnnnnnnnnnnnnnnnnnnnnnnnnnnnnnnnnnnnnnnnnnnnnnnnnnnnnnnnnnnnnnnnnnnnnnnnnnnnnnnnnnnnnnnnnnnnnnnnnnnnnnnnnnnnnnnnnnnnnnnnnnnnnnnnnnnnnnnnnnnnnnnnnnnnnnnnnnnnnnnnnnnnnnnnnnnnnnnnnnnnnnnnnnnnnnnnnnnnnnnnnnnnnnnnnnnnnnnnnnnnnnnnnnnnnnnnnnnnnnnnnnnnnnnnnnnnnnnnnnnnnnnnnnnnnnnnnnnnnnnnnnnnnnnnnnnnnnnnnnnnnnnnnnnnnnnnnnnnnnnnnnnnnnnnnnnnnnnnnnnnnnnnnnnnnnnnnnnnnnnnnnnnnnnnnnnnnnnnnnnnnnnnnnnnnnnnnnnnnnnnnnnnnnnnnnnnnnnnnnnnnnnnnnnnnnnnnnnnnnnnnnnnnnnnnnnnnnnnnnnnnnnnnnnnnnnnnnnnnnnnnnnnnnnnnnnnnnnnnnnnnnnnnnnnnnnnnnnnnnnnnnnnnnnnnnnnnnnnnnnnnnnnnnnnnnnnnnnnnnnnnnnnnnnnnnnnnnnnnnnnnnnnnnnnnnnnnnnnnnnnnnnnnnnnnnnnnnnnnnnnnnnnnnnnnnnnnnnnnnnnnnnnnnnnnnnnnnnnnnnnnnnnnnnnnnnnnnnnnnnnnnnnnnnnnnnnnnnnnnnnnnnnnnnnnnnnnnnnnnnnnnnnnnnnnnnnnnnnnnnnnnnnnnnnnnnnnnnnnnnnnnnnnnnnnnnnnnnnnnnnnnnnnnnnnnnnnnnnnnnnnnnnnnnnnnnnnnnnnnnnnnnnnnnnnnnnnnnnnnnnnnnnnnnnnnnnnnnnnnnnnnnnnnnnnnnnnnnnnnnnnnnnnnnnnnnnnnnnnnnnnnnnnnnnnnnnnnnnnnnnnnnnnnnnnnnnnnnnnnnnnnnnnnnnnnnnnnnnnnnnnnnnnnnnnnnnnnnnnnnnnnnnnnnnnnnnnnnnnnnnnnnnnnnnnnnnnnnnnnnnnnnnnnnnnnnnnnnnnnnnnnnnnnnnnnnnnnnnnnnnnnnnnnnnnnnnnnnnnnnnnnnnnnnnnnnnnnnnnnnnnnnnnnnnnnnnnnnnnnnnnnnnnnnnnnnnnnnnnnnnnnnnnnnnnnnnnnnnnnnnnnnnnnnnnnnnnnnnnnnnnnnnnnnnnnnnnnnnnnnnnnnnnnnnnnnnnnnnnnnnnnnnnnnnnnnnnnnnnnnnnnnnnnnnnnnnnnnnnnnnnnnnnnnnnnnnnnnnnnnnnnnnnnnnnnnnnnnnnnnnnnnnnnnnnnnnnnnnnnnnnnnnnnnnnnnnnnnnnnnnnnnnnnnnnnnnnnnnnnnnnnnnnnnnnnnnnnnnnnnnnnnnnnnnnnnnnnnnnnnnnnnnnnnnnnnnnnnnnnnnnnnnnnnnnnnnnnnnnnnnnnnnnnnnnnnnnnnnnnnnnnnnnnnnnnnnnnnnnnnnnnnnnnnnnnnnnnnnnnnnnnnnnnnnnnnnnnnnnnnnnnnnnnnnnnnnnnnnnnnnnnnnnnnnnnnnnnnnnnnnnnnnnnnnnnnnnnnnnnnnnnnnnnnnnnnnnnnnnnnnnnnnnnnnnnnnnnnnnnnnnnnnnnnnnnnnnnnnnnnnnnnnnnnnnnnnnnnnnnnnnnnnnnnnnnnnnnnnnnnnnnnnnnnnnnnnnnnnnnnnnnnnnnnnnnnnnnnnnnnnnnnnnnnnnnnnnnnnnnnnnnnnnnnnnnnnnnnnnnnnnnnnnnnnnnnnnnnnnnnnnnnnnnnnnnnnnnnnnnnnnnnnnnnnnnnnnnnnnnnnnnnnnnnnnnnnnnnnnnnnnnnnnnnnnnnnnnnnnnnnnnnnnnnnnnnnnnnnnnnnnnnnnnnnnnnnnnnnnnnnnnnnnnnnnnnnnnnnnnnnnnnnnnnnnnnnnnnnnnnnnnnnnnnnnnnnnnnnnnnnnnnnnnnnnnnnnnnnnnnnnnnnnnnnnnnnnnnnnnnnnnnnnnnnnnnnnnnnnnnnnnnnnnnnnnnnnnnnnnnnnnnnnnnnnnnnnnnnnnnnnnnnnnnnnnnnnnnnnnnnnnnnnnnnnnnnnnnnnnnnnnnnnnnnnnnnnnnnnnnnnnnnnnnnnnnnnnnnnnnnnnnnnnnnnnnnnnnnnnnnnnnnnnnnnnnnnnnnnnnnnnnnnnnnnnnnnnnnnnnnnnnnnnnnnnnnnnnnnnnnnnnnnnnnnnnnnnnnnnnnnnnnnnnnnnnnnnnnnnnnnnnnnnnnnnnnnnnnnnnnnnnnnnnnnnnnnnnnnnnnnnnnnnnnnnnnnnnnnnnnnnnnnnnnnnnnnnnnnnnnnnnnnnnnnnnnnnnnnnnnnnnnnnnnnnnnnnnnnnnnnnnnnnnnnnnnnnnnnnnnnnnnnnnnnnnnnnnnnnnnnnnnnnnnnnnnnnnnnnnnnnnnnnnnnnnnnnnnnnnnnnnnnnnnnnnnnnnnnnnnnnnnnnnnnnnnnnnnnnnnnnnnnnnnnnnnnnnnnnnnnnnnnnnnnnnnnnnnnnnnnnnnnnnnnnnnnnnnnnnnnnnnnnnnnnnnnnnnnnnnnnnnnnnnnnnnnnnnnnnnnnnnnnnnnnnnnnnnnnnnnnnnnnnnnnnnnnnnnnnnnnnnnnnnnnnnnnnnnnnnnnnnnnnnnnnnnnnnnnnnnnnnnnnnnnnnnnnnnnnnnnnnnnnnnnnnnnnnnnnnnnnnnnnnnnnnnnnnnnnnnnnnnnnnnnnnnnnnnnnnnnnnnnnnnnnnnnnnnnnnnnnnnnnnnnnnnnnnnnnnnnnnnnnnnnnnnnnnnnnnnnnnnnnnnnnnnnnnnnnnnnnnnnnnnnnnnnnnnnnnnnnnnnnnnnnnnnnnnnnnnnnnnnnnnnnnnnnnnnnnnnnnnnnnnnnnnnnnnnnnnnnnnnnnnnnnnnnnnnnnnnnnnnnnnnnnnnnnnnnnnnnnnnnnnnnnnnnnnnnnnnnnnnnnnnnnnnnnnnnnnnnnnnnnnnnnnnnnnnnnnnnnnnnnnnnnnnnnnnnnnnnnnnnnnnnnnnnnnnnnnnnnnnnnnnnnnnnnnnnnnnnnnnnnnnnnnnnnnnnnnnnnnnnnnnnnnnnnnnnnnnnnnnnnnnnnnnnnnnnnnnnnnnnnnnnnnnnnnnnnnnnnnnnnnnnnnnnnnnnnnnnnnnnnnnnnnnnnnnnnnnnnnnnnnnnnnnnnnnnnnnnnnnnnnnnnnnnnnnnnnnnnnnnnnnnnnnnnnnnnnnnnnnnnnnnnnnnnnnnnnnnnnnnnnnnnnnnnnnnnnnnnnnnnnnnnnnnnnnnnnnnnnnnnnnnnnnnnnnnnnnnnnnnnnnnnnnnnnnnnnnnnnnnnnnnnnnnnnnnnnnnnnnnnnnnnnnnnnnnnnnnnnnnnnnnnnnnnnnnnnnnnnnnnnnnnnnnnnnnnnnnnnnnnnnnnnnnnnnnnnnnnnnnnnnnnnnnnnnnnnnnnnnnnnnnnnnnnnnnnnnnnnnnnnnnnnnnnnnnnnnnnnnnnnnnnnnnnnnnnnnnnnnnnnnnnnnnnnnnnnnnnnnnnnnnnnnnnnnnnnnnnnnnnnnnnnnnnnnnnnnnnnnnnnnnnnnnnnnnnnnnnnnnnnnnnnnnnnnnnnnnnnnnnnnnnnnnnnnnnnnnnnnnnnnnnnnnnnnnnnnnnnnnnnnnnnnnnnnnnnnnnnnnnnnnnnnnnnnnnnnnnnnnnnnnnnnnnnnnnnnnnnnnnnnnnnnnnnnnnnnnnnnnnnnnnnnnnnnnnnnnnnnnnnnnnnnnnnnnnnnnnnnnnnnnnnnnnnnnnnnnnnnnnnnnnnnnnnnnnnnnnnnnnnnnnnnnnnnnnnnnnnnnnnnnnnnnnnnnnnnnnnnnnnnnnnnnnnnnnnnnnnnnnnnnnnnnnnnnnnnnnnnnnnnnnnnnnnnnnnnnnnnnnnnnnnnnnnnnnnnnnnnnnnnnnnnnnnnnnnnnnnnnnnnnnnnnnnnnnnnnnnnnnnnnnnnnnnnnnnnnnnnnnnnnnnnnnnnnnnnnnnnnnnnnnnnnnnnnnnnnnnnnnnnnnnnnnnnnnnnnnnnnnnnnnnnnnnnnnnnnnnnnnnnnnnnnnnnnnnnnnnnnnnnnnnnnnnnnnnnnnnnnnnnnnnnnnnnnnnnnnnnnnnnnnnnnnnnnnnnnnnnnnnnnnnnnnnnnnnnnnnnnnnnnnnnnnnnnnnnnnnnnnnnnnnnnnnnnnnnnnnnnnnnnnnnnnnnnnnnnnnnnnnnnnnnnnnnnnnnnnnnnnnnnnnnnnnnnnnnnnnnnnnnnnnnnnnnnnnnnnnnnnnnnnnnnnnnnnnnnnnnnnnnnnnnnnnnnnnnnnnnnnnnnnnnnnnnnnnnnnnnnnnnnnnnnnnnnnnnnnnnnnnnnnnnnnnnnnnnnnnnnnnnnnnnnnnnnnnnnnnnnnnnnnnnnnnnnnnnnnnnnnnnnnnnnnnnnnnnnnnnnnnnnnnnnnnnnnnnnnnnnnnnnnnnnnnnnnnnnnnnnnnnnnnnnnnnnnnnnnnnnnnnnnnnnnnnnnnnnnnnnnnnnnnnnnnnnnnnnnnnnnnnnnnnnnnnnnnnnnnnnnnnnnnnnnnnnnnnnnnnnnnnnnnnnnnnnnnnnnnnnnnnnnnnnnnnnnnnnnnnnnnnnnnnnnnnnnnnnnnnnnnnnnnnnnnnnnnnnnnnnnnnnnnnnnnnnnnnnnnnnnnnnnnnnnnnnnnnnnnnnnnnnnnnnnnnnnnnnnnnnnnnnnnnnnnnnnnnnnnnnnnnnnnnnnnnnnnnnnnnnnnnnnnnnnnnnnnnnnnnnnnnnnnnnnnnnnnnnnnnnnnnnnnnnnnnnnnnnnnnnnnnnnnnnnnnnnnnnnnnnnnnnnnnnnnnnnnnnnnnnnnnnnnnnnnnnnnnnnnnnnnnnnnnnnnnnnnnnnnnnnnnnnnnnnnnnnnnnnnnnnnnnnnnnnnnnnnnnnnnnnnnnnnnnnnnnnnnnnnnnnnnnnnnnnnnnnnnnnnnnnnnnnnnnnnnnnnnnnnnnnnnnnnnnnnnnnnnnnnnnnnnnnnnnnnnnnnnnnnnnnnnnnnnnnnnnnnnnnnnnnnnnnnnnnnnnnnnnnnnnnnnnnnnnnnnnnnnnnnnnnnnnnnnnnnnnnnnnnnnnnnnnnnnnnnnnnnnnnnnnnnnnnnnnnnnnnnnnnnnnnnnnnnnnnnnnnnnnnnnnnnnnnnnnnnnnnnnnnnnnnnnnnnnnnnnnnnnnnnnnnnnnnnnnnnnnnnnnnnnnnnnnnnnnnnnnnnnnnnnnnnnnnnnnnnnnnnnnnnnnnnnnnnnnnnnnnnnnnnnnnnnnnnnnnnnnnnnnnnnnnnnnnnnnnnnnnnnnnnnnnnnnnnnnnnnnnnnnnnnnnnnnnnnnnnnnnnnnnnnnnnnnnnnnnnnnnnnnnnnnnnnnnnnnnnnnnnnnnnnnnnnnnnnnnnnnnnnnnnnnnnnnnnnnnnnnnnnnnnnnnnnnnnnnnnnnnnnnnnnnnnnnnnnnnnnnnnnnnnnnnnnnnnnnnnnnnnnnnnnnnnnnnnnnnnnnnnnnnnnnnnnnnnnnnnnnnnnnnnnnnnnnnnnnnnnnnnnnnnnnnnnnnnnnnnnnnnnnnnnnnnnnnnnnnnnnnnnnnnnnnnnnnnnnnnnnnnnnnnnnnnnnnnnnnnnnnnnnnnnnnnnnnnnnnnnnnnnnnnnnnnnnnnnnnnnnnnnnnnnnnnnnnnnnnnnnnnnnnnnnnnnnnnnnnnnnnnnnnnnnnnnnnnnnnnnnnnnnnnnnnnnnnnnnnnnnnnnnnnnnnnnnnnnnnnnnnnnnnnnnnnnnnnnnnnnnnnnnnnnnnnnnnnnnnnnnnnnnnnnnnnnnnnnnnnnnnnnnnnnnnnnnnnnnnnnnnnnnnnnnnnnnnnnnnnnnnnnnnnnnnnnnnnnnnnnnnnnnnnnnnnnnnnnnnnnnnnnnnnnnnnnnnnnnnnnnnnnnnnnnnnnnnnnnnnnnnnnnnnnnnnnnnnnnnnnnnnnnnnnnnnnnnnnnnnnnnnnnnnnnnnnnnnnnnnnnnnnnnnnnnnnnnnnnnnnnnnnnnnnnnnnnnnnnnnnnnnnnnnnnnnnnnnnnnnnnnnnnnnnnnnnnnnnnnnnnnnnnnnnnnnnnnnnnnnnnnnnnnnnnnnnnnnnnnnnnnnnnnnnnnnnnnnnnnnnnnnnnnnnnnnnnnnnnnnnnnnnnnnnnnnnnnnnnnnnnnnnnnnnnnnnnnnnnnnnnnnnnnnnnnnnnnnnnnnnnnnnnnnnnnnnnnnnnnnnnnnnnnnnnnnnnnnnnnnnnnnnnnnnnnnnnnnnnnnnnnnnnnnnnnnnnnnnnnnnnnnnnnnnnnnnnnnnnnnnnnnnnnnnnnnnnnnnnnnnnnnnnnnnnnnnnnnnnnnnnnnnnnnnnnnnnnnnnnnnnnnnnnnnnnnnnnnnnnnnnnnnnnnnnnnnnnnnnnnnnnnnnnnnnnnnnnnnnnnnnnnnnnnnnnnnnnnnnnnnnnnnnnnnnnnnnnnnnnnnnnnnnnnnnnnnnnnnnnnnnnnnnnnnnnnnnnnnnnnnnnnnnnnnnnnnnnnnnnnnnnnnnnnnnnnnnnnnnnnnnnnnnnnnnnnnnnnnnnnnnnnnnnnnnnnnnnnnnnnnnnnnnnnnnnnnnnnnnnnnnnnnnnnnnnnnnnnnnnnnnnnnnnnnnnnnnnnnnnnnnnnnnnnnnnnnnnnnnnnnnnnnnnnnnnnnnnnnnnnnnnnnnnnnnnnnnnnnnnnnnnnnnnnnnnnnnnnnnnnnnnnnnnnnnnnnnnnnnnnnnnnnnnnnnnnnnnnnnnnnnnnnnnnnnnnnnnnnnnnnnnnnnnnnnnnnnnnnnnnnnnnnnnnnnnnnnnnnnnnnnnnnnnnnnnnnnnnnnnnnnnnnnnnnnnnnnnnnnnnnnnnnnnnnnnnnnnnnnnnnnnnnnnnnnnnnnnnnnnnnnnnnnnnnnnnnnnnnnnnnnnnnnnnnnnnnnnnnnnnnnnnnnnnnnnnnnnnnnnnnnnnnnnnnnnnnnnnnnnnnnnnnnnnnnnnnnnnnnnnnnnnnnnnnnnnnnnnnnnnnnnnnnnnnnnnnnnnnnnnnnnnnnnnnnnnnnnnnnnnnnnnnnnnnnnnnnnnnnnnnnnnnnnnnnnnnnnnnnnnnnnnnnnnnnnnnnnnnnnnnnnnnnnnnnnnnnnnnnnnnnnnnnnnnnnnnnnnnnnnnnnnnnnnnnnnnnnnnnnnnnnnnnnnnnnnnnnnnnnnnnnnnnnnnnnnnnnnnnnnnnnnnnnnnnnnnnnnnnnnnnnnnnnnnnnnnnnnnnnnnnnnnnnnnnnnnnnnnnnnnnnnnnnnnnnnnnnnnnnnnnnnnnnnnnnnnnnnnnnnnnnnnnnnnnnnnnnnnnnnnnnnnnnnnnnnnnnnnnnnnnnnnnnnnnnnnnnnnnnnnnnnnnnnnnnnnnnnnnnnnnnnnnnnnnnnnnnnnnnnnnnnnnnnnnnnnnnnnnnnnnnnnnnnnnnnnnnnnnnnnnnnnnnnnnnnnnnnnnnnnnnnnnnnnnnnnnnnnnnnnnnnnnnnnnnnnnnnnnnnnnnnnnnnnnnnnnnnnnnnnnnnnnnnnnnnnnnnnnnnnnnnnnnnnnnnnnnnnnnnnnnnnnnnnnnnnnnnnnnnnnnnnnnnnnnnnnnnnnnnnnnnnnnnnnnnnnnnnnnnnnnnnnnnnnnnnnnnnnnnnnnnnnnnnnnnnnnnnnnnnnnnnnnnnnnnnnnnnnnnnnnnnnnnnnnnnnnnnnnnnnnnnnnnnnnnnnnnnnnnnnnnnnnnnnnnnnnnnnnnnnnnnnnnnnnnnnnnnnnnnnnnnnnnnnnnnnnnnnnnnnnnnnnnnnnnnnnnnnnnnnnnnnnnnnnnnnnnnnnnnnnnnnnnnnnnnnnnnnnnnnnnnnnnnnnnnnnnnnnnnnnnnnnnnnnnnnnnnnnnnnnnnnnnnnnnnnnnnnnnnnnnnnnnnnnnnnnnnnnnnnnnnnnnnnnnnnnnnnnnnnnnnnnnnnnnnnnnnnnnnnnnnnnnnnnnnnnnnnnnnnnnnnnnnnnnnnnnnnnnnnnnnnnnnnnnnnnnnnnnnnnnnnnnnnnnnnnnnnnnnnnnnnnnnnnnnnnnnnnnnnnnnnnnnnnnnnnnnnnnnnnnnnnnnnnnnnnnnnnnnnnnnnnnnnnnnnnnnnnnnnnnnnnnnnnnnnnnnnnnnnnnnnnnnnnnnnnnnnnnnnnnnnnnnnnnnnnnnnnnnnnnnnnnnnnnnnnnnnnnnnnnnnnnnnnnnnnnnnnnnnnnnnnnnnnnnnnnnnnnnnnnnnnnnnnnnnnnnnnnnnnnnnnnnnnnnnnnnnnnnnnnnnnnnnnnnnnnnnnnnnnnnnnnnnnnnnnnnnnnnnnnnnnnnnnnnnnnnnnnnnnnnnnnnnnnnnnnnnnnnnnnnnnnnnnnnnnnnnnnnnnnnnnnnnnnnnnnnnnnnnnnnnnnnnnnnnnnnnnnnnnnnnnnnnnnnnnnnnnnnnnnnnnnnnnnnnnnnnnnnnnnnnnnnnnnnnnnnnnnnnnnnnnnnnnnnnnnnnnnnnnnnnnnnnnnnnnnnnnnnnnnnnnnnnnnnnnnnnnnnnnnnnnnnnnnnnnnnnnnnnnnnnnnnnnnnnnnnnnnnnnnnnnnnnnnnnnnnnnnnnnnnnnnnnnnnnnnnnnnnnnnnnnnnnnnnnnnnnnnnnnnnnnnnnnnnnnnnnnnnnnnnnnnnnnnnnnnnnnnnnnnnnnnnnnnnnnnnnnnnnnnnnnnnnnnnnnnnnnnnnnnnnnnnnnnnnnnnnnnnnnnnnnnnnnnnnnnnnnnnnnnnnnnnnnnnnnnnnnnnnnnnnnnnnnnnnnnnnnnnnnnnnnnnnnnnnnnnnnnnnnnnnnnnnnnnnnnnnnnnnnnnnnnnnnnnnnnnnnnnnnnnnnnnnnnnnnnnnnnnnnnnnnnnnnnnnnnnnnnnnnnnnnnnnnnnnnnnnnnnnnnnnnnnnnnnnnnnnnnnnnnnnnnnnnnnnnnnnnnnnnnnnnnnnnnnnnnnnnnnnnnnnnnnnnnnnnnnnnnnnnnnnnnnnnnnnnnnnnnnnnnnnnnnnnnnnnnnnnnnnnnnnnnnnnnnnnnnnnnnnnnnnnnnnnnnnnnnnnnnnnnnnnnnnnnnnnnnnnnnnnnnnnnnnnnnnnnnnnnnnnnnnnnnnnnnnnnnnnnnnnnnnnnnnnnnnnnnnnnnnnnnnnnnnnnnnnnnnnnnnnnnnnnnnnnnnnnnnnnnnnnnnnnnnnnnnnnnnnnnnnnnnnnnnnnnnnnnnnnnnnnnnnnnnnnnnnnnnnnnnnnnnnnnnnnnnnnnnnnnnnnnnnnnnnnnnnnnnnnnnnnnnnnnnnnnnnnnnnnnnnnnnnnnnnnnnnnnnnnnnnnnnnnnnnnnnnnnnnnnnnnnnnnnnnnnnnnnnnnnnnnnnnnnnnnnnnnnnnnnnnnnnnnnnnnnnnnnnnnnnnnnnnnnnnnnnnnnnnnnnnnnnnnnnnnnnnnnnnnnnnnnnnnnnnnnnnnnnnnnnnnnnnnnnnnnnnnnnnnnnnnnnnnnnnnnnnnnnnnnnnnnnnnnnnnnnnnnnnnnnnnnnnnnnnnnnnnnnnnnnnnnnnnnnnnnnnnnnnnnnnnnnnnnnnnnnnnnnnnnnnnnnnnnnnnnnnnnnnnnnnnnnnnnnnnnnnnnnnnnnnnnnnnnnnnnnnnnnnnnnnnnnnnnnnnnnnnnnnnnnnnnnnnnnnnnnnnnnnnnnnnnnnnnnnnnnnnnnnnnnnnnnnnnnnnnnnnnnnnnnnnnnnnnnnnnnnnnnnnnnnnnnnnnnnnnnnnnnnnnnnnnnnnnnnnnnnnnnnnnnnnnnnnnnnnnnnnnnnnnnnnnnnnnnnnnnnnnnnnnnnnnnnnnnnnnnnnnnnnnnnnnnnnnnnnnnnnnnnnnnnnnnnnnnnnnnnnnnnnnnnnnnnnnnnnnnnnnnnnnnnnnnnnnnnnnnnnnnnnnnnnnnnnnnnnnnnnnnnnnnnnnnnnnnnnnnnnnnnnnnnnnnnnnnnnnnnnnnnnnnnnnnnnnnnnnnnnnnnnnnnnnnnnnnnnnnnnnnnnnnnnnnnnnnnnnnnnnnnnnnnnnnnnnnnnnnnnnnnnnnnnnnnnnnnnnnnnnnnnnnnnnnnnnnnnnnnnnnnnnnnnnnnnnnnnnnnnnnnnnnnnnnnnnnnnnnnnnnnnnnnnnnnnnnnnnnnnnnnnnnnnnnnnnnnnnnnnnnnnnnnnnnnnnnnnnnnnnnnnnnnnnnnnnnnnnnnnnnnnnnnnnnnnnnnnnnnnnnnnnnnnnnnnnnnnnnnnnnnnnnnnnnnnnnnnnnnnnnnnnnnnnnnnnnnnnnnnnnnnnnnnnnnnnnnnnnnnnnnnnnnnnnnnnnnnnnnnnnnnnnnnnnnnnnnnnnnnnnnnnnnnnnnnnnnnnnnnnnnnnnnnnnnnnnnnnnnnnnnnnnnnnnnnnnnnnnnnnnnnnnnnnnnnnnnnnnnnnnnnnnnnnnnnnnnnnnnnnnnnnnnnnnnnnnnnnnnnnnnnnnnnnnnnnnnnnnnnnnnnnnnnnnnnnnnnnnnnnnnnnnnnnnnnnnnnnnnnnnnnnnnnnnnnnnnnnnnnnnnnnnnnnnnnnnnnnnnnnnnnnnnnnnnnnnnnnnnnnnnnnnnnnnnnnnnnnnnnnnnnnnnnnnnnnnnnnnnnnnnnnnnnnnnnnnnnnnnnnnnnnnnnnnnnnnnnnnnnnnnnnnnnnnnnnnnnnnnnnnnnnnnnnnnnnnnnnnnnnnnnnnnnnnnnnnnnnnnnnnnnnnnnnnnnnnnnnnnnnnnnnnnnnnnnnnnnnnnnnnnnnnnnnnnnnnnnnnnnnnnnnnnnnnnnnnnnnnnnnnnnnnnnnnnnnnnnnnnnnnnnnnnnnnnnnnnnnnnnnnnnnnnnnnnnnnnnnnnnnnnnnnnnnnnnnnnnnnnnnnnnnnnnnnnnnnnnnnnnnnnnnnnnnnnnnnnnnnnnnnnnnnnnnnnnnnnnnnnnnnnnnnnnnnnnnnnnnnnnnnnnnnnnnnnnnnnnnnnnnnnnnnnnnnnnnnnnnnnnnnnnnnnnnnnnnnnnnnnnnnnnnnnnnnnnnnnnnnnnnnnnnnnnnnnnnnnnnnnnnnnnnnnnnnnnnnnnnnnnnnnnnnnnnnnnnnnnnnnnnnnnnnnnnnnnnnnnnnnnnnnnnnnnnnnnnnnnnnnnnnnnnnnnnnnnnnnnnnnnnnnnnnnnnnnnnnnnnnnnnnnnnnnnnnnnnnnnnnnnnnnnnnnnnnnnnnnnnnnnnnnnnnnnnnnnnnnnnnnnnnnnnnnnnnnnnnnnnnnnnnnnnnnnnnnnnnnnnnnnnnnnnnnnnnnnnnnnnnnnnnnnnnnnnnnnnnnnnnnnnnnnnnnnnnnnnnnnnnnnnnnnnnnnnnnnnnnnnnnnnnnnnnnnnnnnnnnnnnnnnnnnnnnnnnnnnnnnnnnnnnnnnnnnnnnnnnnnnnnnnnnnnnnnnnnnnnnnnnnnnnnnnnnnnnnnnnnnnnnnnnnnnnnnnnnnnnnnnnnnnnnnnnnnnnnnnnnnnnnnnnnnnnnnnnnnnnnnnnnnnnnnnnnnnnnnnnnnnnnnnnnnnnnnnnnnnnnnnnnnnnnnnnnnnnnnnnnnnnnnnnnnnnnnnnnnnnnnnnnnnnnnnnnnnnnnnnnnnnnnnnnnnnnnnnnnnnnnnnnnnnnnnnnnnnnnnnnnnnnnnnnnnnnnnnnnnnnnnnnnnnnnnnnnnnnnnnnnnnnnnnnnnnnnnnnnnnnnnnnnnnnnnnnnnnnnnnnnnnnnnnnnnnnnnnnnnnnnnnnnnnnnnnnnnnnnnnnnnnnnnnnnnnnnnnnnnnnnnnnnnnnnnnnnnnnnnnnnnnnnnnnnnnnnnnnnnnnnnnnnnnnnnnnnnnnnnnnnnnnnnnnnnnnnnnnnnnnnnnnnnnnnnnnnnnnnnnnnnnnnnnnnnnnnnnnnnnnnnnnnnnnnnnnnnnnnnnnnnnnnnnnnnnnnnnnnnnnnnnnnnnnnnnnnnnnnnnnnnnnnnnnnnnnnnnnnnnnnnnnnnnnnnnnnnnnnnnnnnnnnnnnnnnnnnnnnnnnnnnnnnnnnnnnnnnnnnnnnnnnnnnnnnnnnnnnnnnnnnnnnnnnnnnnnnnnnnnnnnnnnnnnnnnnnnnnnnnnnnnnnnnnnnnnnnnnnnnnnnnnnnnnnnnnnnnnnnnnnnnnnnnnnnnnnnnnnnnnnnnnnnnnnnnnnnnnnnnnnnnnnnnnnnnnnnnnnnnnnnnnnnnnnnnnnnnnnnnnnnnnnnnnnnnnnnnnnnnnnnnnnnnnnnnnnnnnnnnnnnnnnnnnnnnnnnnnnnnnnnnnnnnnnnnnnnnnnnnnnnnnnnnnnnnnnnnnnnnnnnnnnnnnnnnnnnnnnnnnnnnnnnnnnnnnnnnnnnnnnnnnnnnnnnnnnnnnnnnnnnnnnnnnnnnnnnnnnnnnnnnnnnnnnnnnnnnnnnnnnnnnnnnnnnnnnnnnnnnnnnnnnnnnnnnnnnnnnnnnnnnnnnnnnnnnnnnnnnnnnnnnnnnnnnnnnnnnnnnnnnnnnnnnnnnnnnnnnnnnnnnnnnnnnnnnnnnnnnnnnnnnnnnnnnnnnnnnnnnnnnnnnnnnnnnnnnnnnnnnnnnnnnnnnnnnnnnnnnnnnnnnnnnnnnnnnnnnnnnnnnnnnnnnnnnnnnnnnnnnnnnnnnnnnnnnnnnnnnnnnnnnnnnnnnnnnnnnnnnnnnnnnnnnnnnnnnnnnnnnnnnnnnnnnnnnnnnnnnnnnnnnnnnnnnnnnnnnnnnnnnnnnnnnnnnnnnnnnnnnnnnnnnnnnnnnnnnnnnnnnnnnnnnnnnnnnnnnnnnnnnnnnnnnnnnnnnnnnnnnnnnnnnnnnnnnnnnnnnnnnnnnnnnnnnnnnnnnnnnnnnnnnnnnnnnnnnnnnnnnnnnnnnnnnnnnnnnnnnnnnnnnnnnnnnnnnnnnnnnnnnnnnnnnnnnnnnnnnnnnnnnnnnnnnnnnnnnnnnnnnnnnnnnnnnnnnnnnnnnnnnnnnnnnnnnnnnnnnnnnnnnnnnnnnnnnnnnnnnnnnnnnnnnnnnnnnnnnnnnnnnnnnnnnnnnnnnnnnnnnnnnnnnnnnnnnnnnnnnnnnnnnnnnnnnnnnnnnnnnnnnnnnnnnnnnnnnnnnnnnnnnnnnnnnnnnnnnnnnnnnnnnnnnnnnnnnnnnnnnnnnnnnnnnnnnnnnnnnnnnnnnnnnnnnnnnnnnnnnnnnnnnnnnnnnnnnnnnnnnnnnnnnnnnnnnnnnnnnnnnnnnnnnnnnnnnnnnnnnnnnnnnnnnnnnnnnnnnnnnnnnnnnnnnnnnnnnnnnnnnnnnnnnnnnnnnnnnnnnnnnnnnnnnnnnnnnnnnnnnnnnnnnnnnnnnnnnnnnnnnnnnnnnnnnnnnnnnnnnnnnnnnnnnnnnnnnnnnnnnnnnnnnnnnnnnnnnnnnnnnnnnnnnnnnnnnnnnnnnnnnnnnnnnnnnnnnnnnnnnnnnnnnnnnnnnnnnnnnnnnnnnnnnnnnnnnnnnnnnnnnnnnnnnnnnnnnnnnnnnnnnnnnnnnnnnnnnnnnnnnnnnnnnnnnnnnnnnnnnnnnnnnnnnnnnnnnnnnnnnnnnnnnnnnnnnnnnnnnnnnnnnnnnnnnnnnnnnnnnnnnnnnnnnnnnnnnnnnnnnnnnnnnnnnnnnnnnnnnnnnnnnnnnnnnnnnnnnnnnnnnnnnnnnnnnnnnnnnnnnnnnnnnnnnnnnnnnnnnnnnnnnnnnnnnnnnnnnnnnnnnnnnnnnnnnnnnnnnnnnnnnnnnnnnnnnnnnnnnnnnnnnnnnnnnnnnnnnnnnnnnnnnnnnnnnnnnnnnnnnnnnnnnnnnnnnnnnnnnnnnnnnnnnnnnnnnnnnnnnnnnnnnnnnnnnnnnnnnnnnnnnnnnnnnnnnnnnnnnnnnnnnnnnnnnnnnnnnnnnnnnnnnnnnnnnnnnnnnnnnnnnnnnnnnnnnnnnnnnnnnnnnnnnnnnnnnnnnnnnnnnnnnnnnnnnnnnnnnnnnnnnnnnnnnnnnnnnnnnnnnnnnnnnnnnnnnnnnnnnnnnnnnnnnnnnnnnnnnnnnnnnnnnnnnnnnnnnnnnnnnnnnnnnnnnnnnnnnnnnnnnnnnnnnnnnnnnnnnnnnnnnnnnnnnnnnnnnnnnnnnnnnnnnnnnnnnnnnnnnnnnnnnnnnnnnnnnnnnnnnnnnnnnnnnnnnnnnnnnnnnnnnnnnnnnnnnnnnnnnnnnnnnnnnnnnnnnnnnnnnnnnnnnnnnnnnnnnnnnnnnnnnnnnnnnnnnnnnnnnnnnnnnnnnnnnnnnnnnnnnnnnnnnnnnnnnnnnnnnnnnnnnnnnnnnnnnnnnnnnnnnnnnnnnnnnnnnnnnnnnnnnnnnnnnnnnnnnnnnnnnnnnnnnnnnnnnnnnnnnnnnnnnnnnnnnnnnnnnnnnnnnnnnnnnnnnnnnnnnnnnnnnnnnnnnnnnnnnnnnnnnnnnnnnnnnnnnnnnnnnnnnnnnnnnnnnnnnnnnnnnnnnnnnnnnnnnnnnnnnnnnnnnnnnnnnnnnnnnnnnnnnnnnnnnnnnnnnnnnnnnnnnnnnnnnnnnnnnnnnnnnnnnnnnnnnnnnnnnnnnnnnnnnnnnnnnnnnnnnnnnnnnnnnnnnnnnnnnnnnnnnnnnnnnnnnnnnnnnnnnnnnnnnnnnnnnnnnnnnnnnnnnnnnnnnnnnnnnnnnnnnnnnnnnnnnnnnnnnnnnnnnnnnnnnnnnnnnnnnnnnnnnnnnnnnnnnnnnnnnnnnnnnnnnnnnnnnnnnnnnnnnnnnnnnnnnnnnnnnnnnnnnnnnnnnnnnnnnnnnnnnnnnnnnnnnnnnnnnnnnnnnnnnnnnnnnnnnnnnnnnnnnnnnnnnnnnnnnnnnnnnnnnnnnnnnnnnnnnnnnnnnnnnnnnnnnnnnnnnnnnnnnnnnnnnnnnnnnnnnnnnnnnnnnnnnnnnnnnnnnnnnnnnnnnnnnnnnnnnnnnnnnnnnnnnnnnnnnnnnnnnnnnnnnnnnnnnnnnnnnnnnnnnnnnnnnnnnnnnnnnnnnnnnnnnnnnnnnnnnnnnnnnnnnnnnnnnnnnnnnnnnnnnnnnnnnnnnnnnnnnnnnnnnnnnnnnnnnnnnnnnnnnnnnnnnnnnnnnnnnnnnnnnnnnnnnnnnnnnnnnnnnnnnnnnnnnnnnnnnnnnnnnnnnnnnnnnnnnnnnnnnnnnnnnnnnnnnnnnnnnnnnnnnnnnnnnnnnnnnnnnnnnnnnnnnnnnnnnnnnnnnnnnnnnnnnnnnnnnnnnnnnnnnnnnnnnnnnnnnnnnnnnnnnnnnnnnnnnnnnnnnnnnnnnnnnnnnnnnnnnnnnnnnnnnnnnnnnnnnnnnnnnnnnnnnnnnnnnnnnnnnnnnnnnnnnnnnnnnnnnnnnnnnnnnnnnnnnnnnnnnnnnnnnnnnnnnnnnnnnnnnnnnnnnnnnnnnnnnnnnnnnnnnnnnnnnnnnnnnnnnnnnnnnnnnnnnnnnnnnnnnnnnnnnnnnnnnnnnnnnnnnnnnnnnnnnnnnnnnnnnnnnnnnnnnnnnnnnnnnnnnnnnnnnnnnnnnnnnnnnnnnnnnnnnnnnnnnnnnnnnnnnnnnnnnnnnnnnnnnnnnnnnnnnnnnnnnnnnnnnnnnnnnnnnnnnnnnnnnnnnnnnnnnnnnnnnnnnnnnnnnnnnnnnnnnnnnnnnnnnnnnnnnnnnnnnnnnnnnnnnnnnnnnnnnnnnnnnnnnnnnnnnnnnnnnnnnnnnnnnnnnnnnnnnnnnnnnnnnnnnnnnnnnnnnnnnnnnnnnnnnnnnnnnnnnnnnnnnnnnnnnnnnnnnnnnnnnnnnnnnnnnnnnnnnnnnnnnnnnnnnnnnnnnnnnnnnnnnnnnnnnnnnnnnnnnnnnnnnnnnnnnnnnnnnnnnnnnnnnnnnnnnnnnnnnnnnnnnnnnnnnnnnnnnnnnnnnnnnnnnnnnnnnnnnnnnnnnnnnnnnnnnnnnnnnnnnnnnnnnnnnnnnnnnnnnnnnnnnnnnnnnnnnnnnnnnnnnnnnnnnnnnnnnnnnnnnnnnnnnnnnnnnnnnnnnnnnnnnnnnnnnnnnnnnnnnnnnnnnnnnnnnnnnnnnnnnnnnnnnnnnnnnnnnnnnnnnnnnnnnnnnnnnnnnnnnnnnnnnnnnnnnnnnnnnnnnnnnnnnnnnnnnnnnnnnnnnnnnnnnnnnnnnnnnnnnnnnnnnnnnnnnnnnnnnnnnnnnnnnnnnnnnnnnnnnnnnnnnnnnnnnnnnnnnnnnnnnnnnnnnnnnnnnnnnnnnnnnnnnnnnnnnnnnnnnnnnnnnnnnnnnnnnnnnnnnnnnnnnnnnnnnnnnnnnnnnnnnnnnnnnnnnnnnnnnnnnnnnnnnnnnnnnnnnnnnnnnnnnnnnnnnnnnnnnnnnnnnnnnnnnnnnnnnnnnnnnnnnnnnnnnnnnnnnnnnnnnnnnnnnnnnnnnnnnnnnnnnnnnnnnnnnnnnnnnnnnnnnnnnnnnnnnnnnnnnnnnnnnnnnnnnnnnnnnnnnnnnnnnnnnnnnnnnnnnnnnnnnnnnnnnnnnnnnnnnnnnnnnnnnnnnnnnnnnnnnnnnnnnnnnnnnnnnnnnnnnnnnnnnnnnnnnnnnnnnnnnnnnnnnnnnnnnnnnnnnnnnnnnnnnnnnnnnnnnnnnnnnnnnnnnnnnnnnnnnnnnnnnnnnnnnnnnnnnnnnnnnnnnnnnnnnnnnnnnnnnnnnnnnnnnnnnnnnnnnnnnnnnnnnnnnnnnnnnnnnnnnnnnnnnnnnnnnnnnnnnnnnnnnnnnnnnnnnnnnnnnnnnnnnnnnnnnnnnnnnnnnnnnnnnnnnnnnnnnnnnnnnnnnnnnnnnnnnnnnnnnnnnnnnnnnnnnnnnnnnnnnnnnnnnnnnnnnnnnnnnnnnnnnnnnnnnnnnnnnnnnnnnnnnnnnnnnnnnnnnnnnnnnnnnnnnnnnnnnnnnnnnnnnnnnnnnnnnnnnnnnnnnnnnnnnnnnnnnnnnnnnnnnnnnnnnnnnnnnnnnnnnnnnnnnnnnnnnnnnnnnnnnnnnnnnnnnnnnnnnnnnnnnnnnnnnnnnnnnnnnnnnnnnnnnnnnnnnnnnnnnnnnnnnnnnnnnnnnnnnnnnnnnnnnnnnnnnnnnnnnnnnnnnnnnnnnnnnnnnnnnnnnnnnnnnnnnnnnnnnnnnnnnnnnnnnnnnnnnnnnnnnnnnnnnnnnnnnnnnnnnnnnnnnnnnnnnnnnnnnnnnnnnnnnnnnnnnnnnnnnnnnnnnnnnnnnnnnnnnnnnnnnnnnnnnnnnnnnnnnnnnnnnnnnnnnnnnnnnnnnnnnnnnnnnnnnnnnnnnnnnnnnnnnnnnnnnnnnnnnnnnnnnnnnnnnnnnnnnnnnnnnnnnnnnnnnnnnnnnnnnnnnnnnnnnnnnnnnnnnnnnnnnnnnnnnnnnnnnnnnnnnnnnnnnnnnnnnnnnnnnnnnnnnnnnnnnnnnnnnnnnnnnnnnnnnnnnnnnnnnnnnnnnnnnnnnnnnnnnnnnnnnnnnnnnnnnnnnnnnnnnnnnnnnnnnnnnnnnnnnnnnnnnnnnnnnnnnnnnnnnnnnnnnnnnnnnnnnnnnnnnnnnnnnnnnnnnnnnnnnnnnnnnnnnnnnnnnnnnnnnnnnnnnnnnnnnnnnnnnnnnnnnnnnnnnnnnnnnnnnnnnnnnnnnnnnnnnnnnnnnnnnnnnnnnnnnnnnnnnnnnnnnnnnnnnnnnnnnnnnnnnnnnnnnnnnnnnnnnnnnnnnnnnnnnnnnnnnnnnnnnnnnnnnnnnnnnnnnnnnnnnnnnnnnnnnnnnnnnnnnnnnnnnnnnnnnnnnnnnnnnnnnnnnnnnnnnnnnnnnnnnnnnnnnnnnnnnnnnnnnnnnnnnnnnnnnnnnnnnnnnnnnnnnnnnnnnnnnnnnnnnnnnnnnnnnnnnnnnnnnnnnnnnnnnnnnnnnnnnnnnnnnnnnnnnnnnnnnnnnnnnnnnnnnnnnnnnnnnnnnnnnnnnnnnnnnnnnnnnnnnnnnnnnnnnnnnnnnnnnnnnnnnnnnnnnnnnnnnnnnnnnnnnnnnnnnnnnnnnnnnnnnnnnnnnnnnnnnnnnnnnnnnnnnnnnnnnnnnnnnnnnnnnnnnnnnnnnnnnnnnnnnnnnnnnnnnnnnnnnnnnnnnnnnnnnnnnnnnnnnnnnnnnnnnnnnnnnnnnnnnnnnnnnnnnnnnnnnnnnnnnnnnnnnnnnnnnnnnnnnnnnnnnnnnnnnnnnnnnnnnnnnnnnnnnnnnnnnnnnnnnnnnnnnnnnnnnnnnnnnnnnnnnnnnnnnnnnnnnnnnnnnnnnnnnnnnnnnnnnnnnnnnnnnnnnnnnnnnnnnnnnnnnnnnnnnnnnnnnnnnnnnnnnnnnnnnnnnnnnnnnnnnnnnnnnnnnnnnnnnnnnnnnnnnnnnnnnnnnnnnnnnnnnnnnnnnnnnnnnnnnnnnnnnnnnnnnnnnnnnnnnnnnnnnnnnnnnnnnnnnnnnnnnnnnnnnnnnnnnnnnnnnnnnnnnnnnnnnnnnnnnnnnnnnnnnnnnnnnnnnnnnnnnnnnnnnnnnnnnnnnnnnnnnnnnnnnnnnnnnnnnnnnnnnnnnnnnnnnnnnnnnnnnnnnnnnnnnnnnnnnnnnnnnnnnnnnnnnnnnnnnnnnnnnnnnnnnnnnnnnnnnnnnnnnnnnnnnnnnnnnnnnnnnnnnnnnnnnnnnnnnnnnnnnnnnnnnnnnnnnnnnnnnnnnnnnnnnnnnnnnnnnnnnnnnnnnnnnnnnnnnnnnnnnnnnnnnnnnnnnnnnnnnnnnnnnnnnnnnnnnnnnnnnnnnnnnnnnnnnnnnnnnnnnnnnnnnnnnnnnnnnnnnnnnnnnnnnnnnnnnnnnnnnnnnnnnnnnnnnnnnnnnnnnnnnnnnnnnnnnnnnnnnnnnnnnnnnnnnnnnnnnnnnnnnnnnnnnnnnnnnnnnnnnnnnnnnnnnnnnnnnnnnnnnnnnnnnnnnnnnnnnnnnnnnnnnnnnnnnnnnnnnnnnnnnnnnnnnnnnnnnnnnnnnnnnnnnnnnnnnnnnnnnnnnnnnnnnnnnnnnnnnnnnnnnnnnnnnnnnnnnnnnnnnnnnnnnnnnnnnnnnnnnnnnnnnnnnnnnnnnnnnnnnnnnnnnnnnnnnnnnnnnnnnnnnnnnnnnnnnnnnnnnnnnnnnnnnnnnnnnnnnnnnnnnnnnnnnnnnnnnnnnnnnnnnnnnnnnnnnnnnnnnnnnnnnnnnnnnnnnnnnnnnnnnnnnnnnnnnnnnnnnnnnnnnnnnnnnnnnnnnnnnnnnnnnnnnnnnnnnnnnnnnnnnnnnnnnnnnnnnnnnnnnnnnnnnnnnnnnnnnnnnnnnnnnnnnnnnnnnnnnnnnnnnnnnnnnnnnnnnnnnnnnnnnnnnnnnnnnnnnnnnnnnnnnnnnnnnnnnnnnnnnnnnnnnnnnnnnnnnnnnnnnnnnnnnnnnnnnnnnnnnnnnnnnnnnnnnnnnnnnnnnnnnnnnnnnnnnnnnnnnnnnnnnnnnnnnnnnnnnnnnnnnnnnnnnnnnnnnnnnnnnnnnnnnnnnnnnnnnnnnnnnnnnnnnnnnnnnnnnnnnnnnnnnnnnnnnnnnnnnnnnnnnnnnnnnnnnnnnnnnnnnnnnnnnnnnnnnnnnnnnnnnnnnnnnnnnnnnnnnnnnnnnnnnnnnnnnnnnnnnnnnnnnnnnnnnnnnnnnnnnnnnnnnnnnnnnnnnnnnnnnnnnnnnnnnnnnnnnnnnnnnnnnnnnnnnnnnnnnnnnnnnnnnnnnnnnnnnnnnnnnnnnnnnnnnnnnnnnnnnnnnnnnnnnnnnnnnnnnnnnnnnnnnnnnnnnnnnnnnnnnnnnnnnnnnnnnnnnnnnnnnnnnnnnnnnnnnnnnnnnnnnnnnnnnnnnnnnnnnnnnnnnnnnnnnnnnnnnnnnnnnnnnnnnnnnnnnnnnnnnnnnnnnnnnnnnnnnnnnnnnnnnnnnnnnnnnnnnnnnnnnnnnnnnnnnnnnnnnnnnnnnnnnnnnnnnnnnnnnnnnnnnnnnnnnnnnnnnnnnnnnnnnnnnnnnnnnnnnnnnnnnnnnnnnnnnnnnnnnnnnnnnnnnnnnnnnnnnnnnnnnnnnnnnnnnnnnnnnnnnnnnnnnnnnnnnnnnnnnnnnnnnnnnnnnnnnnnnnnnnnnnnnnnnnnnnnnnnnnnnnnnnnnnnnnnnnnnnnnnnnnnnnnnnnnnnnnnnnnnnnnnnnnnnnnnnnnnnnnnnnnnnnnnnnnnnnnnnnnnnnnnnnnnnnnnnnnnnnnnnnnnnnnnnnnnnnnnnnnnnnnnnnnnnnnnnnnnnnnnnnnnnnnnnnnnnnnnnnnnnnnnnnnnnnnnnnnnnnnnnnnnnnnnnnnnnnnnnnnnnnnnnnnnnnnnnnnnnnnnnnnnnnnnnnnnnnnnnnnnnnnnnnnnnnnnnnnnnnnnnnnnnnnnnnnnnnnnnnnnnnnnnnnnnnnnnnnnnnnnnnnnnnnnnnnnnnnnnnnnnnnnnnnnnnnnnnnnnnnnnnnnnnnnnnnnnnnnnnnnnnnnnnnnnnnnnnnnnnnnnnnnnnnnnnnnnnnnnnnnnnnnnnnnnnnnnnnnnnnnnnnnnnnnnnnnnnnnnnnnnnnnnnnnnnnnnnnnnnnnnnnnnnnnnnnnnnnnnnnnnnnnnnnnnnnnnnnnnnnnnnnnnnnnnnnnnnnnnnnnnnnnnnnnnnnnnnnnnnnnnnnnnnnnnnnnnnnnnnnnnnnnnnnnnnnnnnnnnnnnnnnnnnnnnnnnnnnnnnnnnnnnnnnnnnnnnnnnnnnnnnnnnnnnnnnnnnnnnnnnnnnnnnnnnnnnnnnnnnnnnnnnnnnnnnnnnnnnnnnnnnnnnnnnnnnnnnnnnnnnnnnnnnnnnnnnnnnnnnnnnnnnnnnnnnnnnnnnnnnnnnnnnnnnnnnnnnnnnnnnnnnnnnnnnnnnnnnnnnnnnnnnnnnnnnnnnnnnnnnnnnnnnnnnnnnnnnnnnnnnnnnnnnnnnnnnnnnnnnnnnnnnnnnnnnnnnnnnnnnnnnnnnnnnnnnnnnnnnnnnnnnnnnnnnnnnnnnnnnnnnnnnnnnnnnnnnnnnnnnnnnnnnnnnnnnnnnnnnnnnnnnnnnnnnnnnnnnnnnnnnnnnnnnnnnnnnnnnnnnnnnnnnnnnnnnnnnnnnnnnnnnnnnnnnnnnnnnnnnnnnnnnnnnnnnnnnnnnnnnnnnnnnnnnnnnnnnnnnnnnnnnnnnnnnnnnnnnnnnnnnnnnnnnnnnnnnnnnnnnnnnnnnnnnnnnnnnnnnnnnnnnnnnnnnnnnnnnnnnnnnnnnnnnnnnnnnnnnnnnnnnnnnnnnnnnnnnnnnnnnnnnnnnnnnnnnnnnnnnnnnnnnnnnnnnnnnnnnnnnnnnnnnnnnnnnnnnnnnnnnnnnnnnnnnnnnnnnnnnnnnnnnnnnnnnnnnnnnnnnnnnnnnnnnnnnnnnnnnnnnnnnnnnnnnnnnnnnnnnnnnnnnnnnnnnnnnnnnnnnnnnnnnnnnnnnnnnnnnnnnnnnnnnnnnnnnnnnnnnnnnnnnnnnnnnnnnnnnnnnnnnnnnnnnnnnnnnnnnnnnnnnnnnnnnnnnnnnnnnnnnnnnnnnnnnnnnnnnnnnnnnnnnnnnnnnnnnnnnnnnnnnnnnnnnnnnnnnnnnnnnnnnnnnnnnnnnnnnnnnnnnnnnnnnnnnnnnnnnnnnnnnnnnnnnnnnnnnnnnnnnnnnnnnnnnnnnnnnnnnnnnnnnnnnnnnnnnnnnnnnnnnnnnnnnnnnnnnnnnnnnnnnnnnnnnnnnnnnnnnnnnnnnnnnnnnnnnnnnnnnnnnnnnnnnnnnnnnnnnnnnnnnnnnnnnnnnnnnnnnnnnnnnnnnnnnnnnnnnnnnnnnnnnnnnnnnnnnnnnnnnnnnnnnnnnnnnnnnnnnnnnnnnnnnnnnnnnnnnnnnnnnnnnnnnnnnnnnnnnnnnnnnnnnnnnnnnnnnnnnnnnnnnnnnnnnnnnnnnnnnnnnnnnnnnnnnnnnnnnnnnnnnnnnnnnnnnnnnnnnnnnnnnnnnnnnnnnnnnnnnnnnnnnnnnnnnnnnnnnnnnnnnnnnnnnnnnnnnnnnnnnnnnnnnnnnnnnnnnnnnnnnnnnnnnnnnnnnnnnnnnnnnnnnnnnnnnnnnnnnnnnnnnnnnnnnnnnnnnnnnnnnnnnnnnnnnnnnnnnnnnnnnnnnnnnnnnnnnnnnnnnnnnnnnnnnnnnnnnnnnnnnnnnnnnnnnnnnnnnnnnnnnnnnnnnnnnnnnnnnnnnnnnnnnnnnnnnnnnnnnnnnnnnnnnnnnnnnnnnnnnnnnnnnnnnnnnnnnnnnnnnnnnnnnnnnnnnnnnnnnnnnnnnnnnnnnnnnnnnnnnnnnnnnnnnnnnnnnnnnnnnnnnnnnnnnnnnnnnnnnnnnnnnnnnnnnnnnnnnnnnnnnnnnnnnnnnnnnnnnnnnnnnnnnnnnnnnnnnnnnnnnnnnnnnnnnnnnnnnnnnnnnnnnnnnnnnnnnnnnnnnnnnnnnnnnnnnnnnnnnnnnnnnnnnnnnnnnnnnnnnnnnnnnnnnnnnnnnnnnnnnnnnnnnnnnnnnnnnnnnnnnnnnnnnnnnnnnnnnnnnnnnnnnnnnnnnnnnnnnnnnnnnnnnnnnnnnnnnnnnnnnnnnnnnnnnnnnnnnnnnnnnnnnnnnnnnnnnnnnnnnnnnnnnnnnnnnnnnnnnnnnnnnnnnnnnnnnnnnnnnnnnnnnnnnnnnnnnnnnnnnnnnnnnnnnnnnnnnnnnnnnnnnnnnnnnnnnnnnnnnnnnnnnnnnnnnnnnnnnnnnnnnnnnnnnnnnnnnnnnnnnnnnnnnnnnnnnnnnnnnnnnnnnnnnnnnnnnnnnnnnnnnnnnnnnnnnnnnnnnnnnnnnnnnnnnnnnnnnnnnnnnnnnnnnnnnnnnnnnnnnnnnnnnnnnnnnnnnnnnnnnnnnnnnnnnnnnnnnnnnnnnnnnnnnnnnnnnnnnnnnnnnnnnnnnnnnnnnnnnnnnnnnnnnnnnnnnnnnnnnnnnnnnnnnnnnnnnnnnnnnnnnnnnnnnnnnnnnnnnnnnnnnnnnnnnnnnnnnnnnnnnnnnnnnnnnnnnnnnnnnnnnnnnnnnnnnnnnnnnnnnnnnnnnnnnnnnnnnnnnnnnnnnnnnnnnnnnnnnnnnnnnnnnnnnnnnnnnnnnnnnnnnnnnnnnnnnnnnnnnnnnnnnnnnnnnnnnnnnnnnnnnnnnnnnnnnnnnnnnnnnnnnnnnnnnnnnnnnnnnnnnnnnnnnnnnnnnnnnnnnnnnnnnnnnnnnnnnnnnnnnnnnnnnnnnnnnnnnnnnnnnnnnnnnnnnnnnnnnnnnnnnnnnnnnnnnnnnnnnnnnnnnnnnnnnnnnnnnnnnnnnnnnnnnnnnnnnnnnnnnnnnnnnnnnnnnnnnnnnnnnnnnnnnnnnnnnnnnnnnnnnnnnnnnnnnnnnnnnnnnnnnnnnnnnnnnnnnnnnnnnnnnnnnnnnnnnnnnnnnnnnnnnnnnnnnnnnnnnnnnnnnnnnnnnnnnnnnnnnnnnnnnnnnnnnnnnnnnnnnnnnnnnnnnnnnnnnnnnnnnnnnnnnnnnnnnnnnnnnnnnnnnnnnnnnnnnnnnnnnnnnnnnnnnnnnnnnnnnnnnnnnnnnnnnnnnnnnnnnnnnnnnnnnnnnnnnnnnnnnnnnnnnnnnnnnnnnnnnnnnnnnnnnnnnnnnnnnnnnnnnnnnnnnnnnnnnnnnnnnnnnnnnnnnnnnnnnnnnnnnnnnnnnnnnnnnnnnnnnnnnnnnnnnnnnnnnnnnnnnnnnnnnnnnnnnnnnnnnnnnnnnnnnnnnnnnnnnnnnnnnnnnnnnnnnnnnnnnnnnnnnnnnnnnnnnnnnnnnnnnnnnnnnnnnnnnnnnnnnnnnnnnnnnnnnnnnnnnnnnnnnnnnnnnnnnnnnnnnnnnnnnnnnnnnnnnnnnnnnnnnnnnnnnnnnnnnnnnnnnnnnnnnnnnnnnnnnnnnnnnnnnnnnnnnnnnnnnnnnnnnnnnnnnnnnnnnnnnnnnnnnnnnnnnnnnnnnnnnnnnnnnnnnnnnnnnnnnnnnnnnnnnnnnnnnnnnnnnnnnnnnnnnnnnnnnnnnnnnnnnnnnnnnnnnnnnnnnnnnnnnnnnnnnnnnnnnnnnnnnnnnnnnnnnnnnnnnnnnnnnnnnnnnnnnnnnnnnnnnnnnnnnnnnnnnnnnnnnnnnnnnnnnnnnnnnnnnnnnnnnnnnnnnnnnnnnnnnnnnnnnnnnnnnnnnnnnnnnnnnnnnnnnnnnnnnnnnnnnnnnnnnnnnnnnnnnnnnnnnnnnnnnnnnnnnnnnnnnnnnnnnnnnnnnnnnnnnnnnnnnnnnnnnnnnnnnnnnnnnnnnnnnnnnnnnnnnnnnnnnnnnnnnnnnnnnnnnnnnnnnnnnnnnnnnnnnnnnnnnnnnnnnnnnnnnnnnnnnnnnnnnnnnnnnnnnnnnnnnnnnnnnnnnnnnnnnnnnnnnnnnnnnnnnnnnnnnnnnnnnnnnnnnnnnnnnnnnnnnnnnnnnnnnnnnnnnnnnnnnnnnnnnnnnnnnnnnnnnnnnnnnnnnnnnnnnnnnnnnnnnnnnnnnnnnnnnnnnnnnnnnnnnnnnnnnnnnnnnnnnnnnnnnnnnnnnnnnnnnnnnnnnnnnnnnnnnnnnnnnnnnnnnnnnnnnnnnnnnnnnnnnnnnnnnnnnnnnnnnnnnnnnnnnnnnnnnnnnnnnnnnnnnnnnnnnnnnnnnnnnnnnnnnnnnnnnnnnnnnnnnnnnnnnnnnnnnnnnnnnnnnnnnnnnnnnnnnnnnnnnnnnnnnnnnnnnnnnnnnnnnnnnnnnnnnnnnnnnnnnnnnnnnnnnnnnnnnnnnnnnnnnnnnnnnnnnnnnnnnnnnnnnnnnnnnnnnnnnnnnnnnnnnnnnnnnnnnnnnnnnnnnnnnnnnnnnnnnnnnnnnnnnnnnnnnnnnnnnnnnnnnnnnnnnnnnnnnnnnnnnnnnnnnnnnnnnnnnnnnnnnnnnnnnnnnnnnnnnnnnnnnnnnnnnnnnnnnnnnnnnnnnnnnnnnnnnnnnnnnnnnnnnnnnnnnnnnnnnnnnnnnnnnnnnnnnnnnnnnnnnnnnnnnnnnnnnnnnnnnnnnnnnnnnnnnnnnnnnnnnnnnnnnnnnnnnnnnnnnnnnnnnnnnnnnnnnnnnnnnnnnnnnnnnnnnnnnnnnnnnnnnnnnnnnnnnnnnnnnnnnnnnnnnnnnnnnnnnnnnnnnnnnnnnnnnnnnnnnnnnnnnnnnnnnnnnnnnnnnnnnnnnnnnnnnnnnnnnnnnnnnnnnnnnnnnnnnnnnnnnnnnnnnnnnnnnnnnnnnnnnnnnnnnnnnnnnnnnnnnnnnnnnnnnnnnnnnnnnnnnnnnnnnnnnnnnnnnnnnnnnnnnnnnnnnnnnnnnnnnnnnnnnnnnnnnnnnnnnnnnnnnnnnnnnnnnnnnnnnnnnnnnnnnnnnnnnnnnnnnnnnnnnnnnnnnnnnnnnnnnnnnnnnnnnnnnnnnnnnnnnnnnnnnnnnnnnnnnnnnnnnnnnnnnnnnnnnnnnnnnnnnnnnnnnnnnnnnnnnnnnnnnnnnnnnnnnnnnnnnnnnnnnnnnnnnnnnnnnnnnnnnnnnnnnnnnnnnnnnnnnnnnnnnnnnnnnnnnnnnnnnnnnnnnnnnnnnnnnnnnnnnnnnnnnnnnnnnnnnnnnnnnnnnnnnnnnnnnnnnnnnnnnnnnnnnnnnnnnnnnnnnnnnnnnnnnnnnnnnnnnnnnnnnnnnnnnnnnnnnnnnnnnnnnnnnnnnnnnnnnnnnnnnnnnnnnnnnnnnnnnnnnnnnnnnnnnnnnnnnnnnnnnnnnnnnnnnnnnnnnnnnnnnnnnnnnnnnnnnnnnnnnnnnnnnnnnnnnnnnnnnnnnnnnnnnnnnnnnnnnnnnnnnnnnnnnnnnnnnnnnnnnnnnnnnnnnnnnnnnnnnnnnnnnnnnnnnnnnnnnnnnnnnnnnnnnnnnnnnnnnnnnnnnnnnnnnnnnnnnnnnnnnnnnnnnnnnnnnnnnnnnnnnnnnnnnnnnnnnnnnnnnnnnnnnnnnnnnnnnnnnnnnnnnnnnnnnnnnnnnnnnnnnnnnnnnnnnnnnnnnnnnnnnnnnnnnnnnnnnnnnnnnnnnnnnnnnnnnnnnnnnnnnnnnnnnnnnnnnnnnnnnnnnnnnnnnnnnnnnnnnnnnnnnnnnnnnnnnnnnnnnnnnnnnnnnnnnnnnnnnnnnnnnnnnnnnnnnnnnnnnnnnnnnnnnnnnnnnnnnnnnnnnnnnnnnnnnnnnnnnnnnnnnnnnnnnnnnnnnnnnnnnnnnnnnnnnnnnnnnnnnnnnnnnnnnnnnnnnnnnnnnnnnnnnnnnnnnnnnnnnnnnnnnnnnnnnnnnnnnnnnnnnnnnnnnnnnnnnnnnnnnnnnnnnnnnnnnnnnnnnnnnnnnnnnnnnnnnnnnnnnnnnnnnnnnnnnnnnnnnnnnnnnnnnnnnnnnnnnnnnnnnnnnnnnnnnnnnnnnnnnnnnnnnnnnnnnnnnnnnnnnnnnnnnnnnnnnnnnnnnnnnnnnnnnnnnnnnnnnnnnnnnnnnnnnnnnnnnnnnnnnnnnnnnnnnnnnnnnnnnnnnnnnnnnnnnnnnnnnnnnnnnnnnnnnnnnnnnnnnnnnnnnnnnnnnnnnnnnnnnnnnnnnnnnnnnnnnnnnnnnnnnnnnnnnnnnnnnnnnnnnnnnnnnnnnnnnnnnnnnnnnnnnnnnnnnnnnnnnnnnnnnnnnnnnnnnnnnnnnnnnnnnnnnnnnnnnnnnnnnnnnnnnnnnnnnnnnnnnnnnnnnnnnnnnnnnnnnnnnnnnnnnnnnnnnnnnnnnnnnnnnnnnnnnnnnnnnnnnnnnnnnnnnnnnnnnnnnnnnnnnnnnnnnnnnnnnnnnnnnnnnnnnnnnnnnnnnnnnnnnnnnnnnnnnnnnnnnnnnnnnnnnnnnnnnnnnnnnnnnnnnnnnnnnnnnnnnnnnnnnnnnnnnnnnnnnnnnnnnnnnnnnnnnnnnnnnnnnnnnnnnnnnnnnnnnnnnnnnnnnnnnnnnnnnnnnnnnnnnnnnnnnnnnnnnnnnnnnnnnnnnnnnnnnnnnnnnnnnnnnnnnnnnnnnnnnnnnnnnnnnnnnnnnnnnnnnnnnnnnnnnnnnnnnnnnnnnnnnnnnnnnnnnnnnnnnnnnnnnnnnnnnnnnnnnnnnnnnnnnnnnnnnnnnnnnnnnnnnnnnnnnnnnnnnnnnnnnnnnnnnnnnnnnnnnnnnnnnnnnnnnnnnnnnnnnnnnnnnnnnnnnnnnnnnnnnnnnnnnnnnnnnnnnnnnnnnnnnnnnnnnnnnnnnnnnnnnnnnnnnnnnnnnnnnnnnnnnnnnnnnnnnnnnnnnnnnnnnnnnnnnnnnnnnnnnnnnnnnnnnnnnnnnnnnnnnnnnnnnnnnnnnnnnnnnnnnnnnnnnnnnnnnnnnnnnnnnnnnnnnnnnnnnnnnnnnnnnnnnnnnnnnnnnnnnnnnnnnnnnnnnnnnnnnnnnnnnnnnnnnnnnnnnnnnnnnnnnnnnnnnnnnnnnnnnnnnnnnnnnnnnnnnnnnnnnnnnnnnnnnnnnnnnnnnnnnnnnnnnnnnnnnnnnnnnnnnnnnnnnnnnnnnnnnnnnnnnnnnnnnnnnnnnnnnnnnnnnnnnnnnnnnnnnnnnnnnnnnnnnnnnnnnnnnnnnnnnnnnnnnnnnnnnnnnnnnnnnnnnnnnnnnnnnnnnnnnnnnnnnnnnnnnnnnnnnnnnnnnnnnnnnnnnnnnnnnnnnnnnnnnnnnnnnnnnnnnnnnnnnnnnnnnnnnnnnnnnnnnnnnnnnnnnnnnnnnnnnnnnnnnnnnnnnnnnnnnnnnnnnnnnnnnnnnnnnnnnnnnnnnnnnnnnnnnnnnnnnnnnnnnnnnnnnnnnnnnnnnnnnnnnnnnnnnnnnnnnnnnnnnnnnnnnnnnnnnnnnnnnnnnnnnnnnnnnnnnnnnnnnnnnnnnnnnnnnnnnnnnnnnnnnnnnnnnnnnnnnnnnnnnnnnnnnnnnnnnnnnnnnnnnnnnnnnnnnnnnnnnnnnnnnnnnnnnnnnnnnnnnnnnnnnnnnnnnnnnnnnnnnnnnnnnnnnnnnnnnnnnnnnnnnnnnnnnnnnnnnnnnnnnnnnnnnnnnnnnnnnnnnnnnnnnnnnnnnnnnnnnnnnnnnnnnnnnnnnnnnnnnnnnnnnnnnnnnnnnnnnnnnnnnnnnnnnnnnnnnnnnnnnnnnnnnnnnnnnnnnnnnnnnnnnnnnnnnnnnnnnnnnnnnnnnnnnnnnnnnnnnnnnnnnnnnnnnnnnnnnnnnnnnnnnnnnnnnnnnnnnnnnnnnnnnnnnnnnnnnnnnnnnnnnnnnnnnnnnnnnnnnnnnnnnnnnnnnnnnnnnnnnnnnnnnnnnnnnnnnnnnnnnnnnnnnnnnnnnnnnnnnnnnnnnnnnnnnnnnnnnnnnnnnnnnnnnnnnnnnnnnnnnnnnnnnnnnnnnnnnnnnnnnnnnnnnnnnnnnnnnnnnnnnnnnnnnnnnnnnnnnnnnnnnnnnnnnnnnnnnnnnnnnnnnnnnnnnnnnnnnnnnnnnnnnnnnnnnnnnnnnnnnnnnnnnnnnnnnnnnnnnnnnnnnnnnnnnnnnnnnnnnnnnnnnnnnnnnnnnnnnnnnnnnnnnnnnnnnnnnnnnnnnnnnnnnnnnnnnnnnnnnnnnnnnnnnnnnnnnnnnnnnnnnnnnnnnnnnnnnnnnnnnnnnnnnnnnnnnnnnnnnnnnnnnnnnnnnnnnnnnnnnnnnnnnnnnnnnnnnnnnnnnnnnnnnnnnnnnnnnnnnnnnnnnnnnnnnnnnnnnnnnnnnnnnnnnnnnnnnnnnnnnnnnnnnnnnnnnnnnnnnnnnnnnnnnnnnnnnnnnnnnnnnnnnnnnnnnnnnnnnnnnnnnnnnnnnnnnnnnnnnnnnnnnnnnnnnnnnnnnnnnnnnnnnnnnnnnnnnnnnnnnnnnnnnnnnnnnnnnnnnnnnnnnnnnnnnnnnnnnnnnnnnnnnnnnnnnnnnnnnnnnnnnnnnnnnnnnnnnnnnnnnnnnnnnnnnnnnnnnnnnnnnnnnnnnnnnnnnnnnnnnnnnnnnnnnnnnnnnnnnnnnnnnnnnnnnnnnnnnnnnnnnnnnnnnnnnnnnnnnnnnnnnnnnnnnnnnnnnnnnnnnnnnnnnnnnnnnnnnnnnnnnnnnnnnnnnnnnnnnnnnnnnnnnnnnnnnnnnnnnnnnnnnnnnnnnnnnnnnnnnnnnnnnnnnnnnnnnnnnnnnnnnnnnnnnnnnnnnnnnnnnnnnnnnnnnnnnnnnnnnnnnnnnnnnnnnnnnnnnnnnnnnnnnnnnnnnnnnnnnnnnnnnnnnnnnnnnnnnnnnnnnnnnnnnnnnnnnnnnnnnnnnnnnnnnnnnnnnnnnnnnnnnnnnnnnnnnnnnnnnnnnnnnnnnnnnnnnnnnnnnnnnnnnnnnnnnnnnnnnnnnnnnnnnnnnnnnnnnnnnnnnnnnnnnnnnnnnnnnnnnnnnnnnnnnnnnnnnnnnnnnnnnnnnnnnnnnnnnnnnnnnnnnnnnnnnnnnnnnnnnnnnnnnnnnnnnnnnnnnnnnnnnnnnnnnnnnnnnnnnnnnnnnnnnnnnnnnnnnnnnnnnnnnnnnnnnnnnnnnnnnnnnnnnnnnnnnnnnnnnnnnnnnnnnnnnnnnnnnnnnnnnnnnnnnnnnnnnnnnnnnnnnnnnnnnnnnnnnnnnnnnnnnnnnnnnnnnnnnnnnnnnnnnnnnnnnnnnnnnnnnnnnnnnnnnnnnnnnnnnnnnnnnnnnnnnnnnnnnnnnnnnnnnnnnnnnnnnnnnnnnnnnnnnnnnnnnnnnnnnnnnnnnnnnnnnnnnnnnnnnnnnnnnnnnnnnnnnnnnnnnnnnnnnnnnnnnnnnnnnnnnnnnnnnnnnnnnnnnnnnnnnnnnnnnnnnnnnnnnnnnnnnnnnnnnnnnnnnnnnnnnnnnnnnnnnnnnnnnnnnnnnnnnnnnnnnnnnnnnnnnnnnnnnnnnnnnnnnnnnnnnnnnnnnnnnnnnnnnnnnnnnnnnnnnnnnnnnnnnnnnnnnnnnnnnnnnnnnnnnnnnnnnnnnnnnnnnnnnnnnnnnnnnnnnnnnnnnnnnnnnnnnnnnnnnnnnnnnnnnnnnnnnnnnnnnnnnnnnnnnnnnnnnnnnnnnnnnnnnnnnnnnnnnnnnnnnnnnnnnnnnnnnnnnnnnnnnnnnnnnnnnnnnnnnnnnnnnnnnnnnnnnnnnnnnnnnnnnnnnnnnnnnnnnnnnnnnnnnnnnnnnnnnnnnnnnnnnnnnnnnnnnnnnnnnnnnnnnnnnnnnnnnnnnnnnnnnnnnnnnnnnnnnnnnnnnnnnnnnnnnnnnnnnnnnnnnnnnnnnnnnnnnnnnnnnnnnnnnnnnnnnnnnnnnnnnnnnnnnnnnnnnnnnnnnnnnnnnnnnnnnnnnnnnnnnnnnnnnnnnnnnnnnnnnnnnnnnnnnnnnnnnnnnnnnnnnnnnnnnnnnnnnnnnnnnnnnnnnnnnnnnnnnnnnnnnnnnnnnnnnnnnnnnnnnnnnnnnnnnnnnnnnnnnnnnnnnnnnnnnnnnnnnnnnnnnnnnnnnnnnnnnnnnnnnnnnnnnnnnnnnnnnnnnnnnnnnnnnnnnnnnnnnnnnnnnnnnnnnnnnnnnnnnnnnnnnnnnnnnnnnnnnnnnnnnnnnnnnnnnnnnnnnnnnnnnnnnnnnnnnnnnnnnnnnnnnnnnnnnnnnnnnnnnnnnnnnnnnnnnnnnnnnnnnnnnnnnnnnnnnnnnnnnnnnnnnnnnnnnnnnnnnnnnnnnnnnnnnnnnnnnnnnnnnnnnnnnnnnnnnnnnnnnnnnnnnnnnnnnnnnnnnnnnnnnnnnnnnnnnnnnnnnnnnnnnnnnnnnnnnnnnnnnnnnnnnnnnnnnnnnnnnnnnnnnnnnnnnnnnnnnnnnnnnnnnnnnnnnnnnnnnnnnnnnnnnnnnnnnnnnnnnnnnnnnnnnnnnnnnnnnnnnnnnnnnnnnnnnnnnnnnnnnnnnnnnnnnnnnnnnnnnnnnnnnnnnnnnnnnnnnnnnnnnnnnnnnnnnnnnnnnnnnnnnnnnnnnnnnnnnnnnnnnnnnnnnnnnnnnnnnnnnnnnnnnnnnnnnnnnnnnnnnnnnnnnnnnnnnnnnnnnnnnnnnnnnnnnnnnnnnnnnnnnnnnnnnnnnnnnnnnnnnnnnnnnnnnnnnnnnnnnnnnnnnnnnnnnnnnnnnnnnnnnnnnnnnnnnnnnnnnnnnnnnnnnnnnnnnnnnnnnnnnnnnnnnnnnnnnnnnnnnnnnnnnnnnnnnnnnnnnnnnnnnnnnnnnnnnnnnnnnnnnnnnnnnnnnnnnnnnnnnnnnnnnnnnnnnnnnnnnnnnnnnnnnnnnnnnnnnnnnnnnnnnnnnnnnnnnnnnnnnnnnnnnnnnnnnnnnnnnnnnnnnnnnnnnnnnnnnnnnnnnnnnnnnnnnnnnnnnnnnnnnnnnnnnnnnnnnnnnnnnnnnnnnnnnnnnnnnnnnnnnnnnnnnnnnnnnnnnnnnnnnnnnnnnnnnnnnnnnnnnnnnnnnnnnnnnnnnnnnnnnnnnnnnnnnnnnnnnnnnnnnnnnnnnnnnnnnnnnnnnnnnnnnnnnnnnnnnnnnnnnnnnnnnnnnnnnnnnnnnnnnnnnnnnnnnnnnnnnnnnnnnnnnnnnnnnnnnnnnnnnnnnnnnnnnnnnnnnnnnnnnnnnnnnnnnnnnnnnnnnnnnnnnnnnnnnnnnnnnnnnnnnnnnnnnnnnnnnnnnnnnnnnnnnnnnnnnnnnnnnnnnnnnnnnnnnnnnnnnnnnnnnnnnnnnnnnnnnnnnnnnnnnnnnnnnnnnnnnnnnnnnnnnnnnnnnnnnnnnnnnnnnnnnnnnnnnnnnnnnnnnnnnnnnnnnnnnnnnnnnnnnnnnnnnnnnnnnnnnnnnnnnnnnnnnnnnnnnnnnnnnnnnnnnnnnnnnnnnnnnnnnnnnnnnnnnnnnnnnnnnnnnnnnnnnnnnnnnnnnnnnnnnnnnnnnnnnnnnnnnnnnnnnnnnnnnnnnnnnnnnnnnnnnnnnnnnnnnnnnnnnnnnnnnnnnnnnnnnnnnnnnnnnnnnnnnnnnnnnnnnnnnnnnnnnnnnnnnnnnnnnnnnnnnnnnnnnnnnnnnnnnnnnnnnnnnnnnnnnnnnnnnnnnnnnnnnnnnnnnnnnnnnnnnnnnnnnnnnnnnnnnnnnnnnnnnnnnnnnnnnnnnnnnnnnnnnnnnnnnnnnnnnnnnnnnnnnnnnnnnnnnnnnnnnnnnnnnnnnnnnnnnnnnnnnnnnnnnnnnnnnnnnnnnnnnnnnnnnnnnnnnnnnnnnnnnnnnnnnnnnnnnnnnnnnnnnnnnnnnnnnnnnnnnnnnnnnnnnnnnnnnnnnnnnnnnnnnnnnnnnnnnnnnnnnnnnnnnnnnnnnnnnnnnnnnnnnnnnnnnnnnnnnnnnnnnnnnnnnnnnnnnnnnnnnnnnnnnnnnnnnnnnnnnnnnnnnnnnnnnnnnnnnnnnnnnnnnnnnnnnnnnnnnnnnnnnnnnnnnnnnnnnnnnnnnnnnnnnnnnnnnnnnnnnnnnnnnnnnnnnnnnnnnnnnnnnnnnnnnnnnnnnnnnnnnnnnnnnnnnnnnnnnnnnnnnnnnnnnnnnnnnnnnnnnnnnnnnnnnnnnnnnnnnnnnnnnnnnnnnnnnnnnnnnnnnnnnnnnnnnnnnnnnnnnnnnnnnnnnnnnnnnnnnnnnnnnnnnnnnnnnnnnnnnnnnnnnnnnnnnnnnnnnnnnnnnnnnnnnnnnnnnnnnnnnnnnnnnnnnnnnnnnnnnnnnnnnnnnnnnnnnnnnnnnnnnnnnnnnnnnnnnnnnnnnnnnnnnnnnnnnnnnnnnnnnnnnnnnnnnnnnnnnnnnnnnnnnnnnnnnnnnnnnnnnnnnnnnnnnnnnnnnnnnnnnnnnnnnnnnnnnnnnnnnnnnnnnnnnnnnnnnnnnnnnnnnnnnnnnnnnnnnnnnnnnnnnnnnnnnnnnnnnnnnnnnnnnnnnnnnnnnnnnnnnnnnnnnnnnnnnnnnnnnnnnnnnnnnnnnnnnnnnnnnnnnnnnnnnnnnnnnnnnnnnnnnnnnnnnnnnnnnnnnnnnnnnnnnnnnnnnnnnnnnnnnnnnnnnnnnnnnnnnnnnnnnnnnnnnnnnnnnnnnnnnnnnnnnnnnnnnnnnnnnnnnnnnnnnnnnnnnnnnnnnnnnnnnnnnnnnnnnnnnnnnnnnnnnnnnnnnnnnnnnnnnnnnnnnnnnnnnnnnnnnnnnnnnnnnnnnnnnnnnnnnnnnnnnnnnnnnnnnnnnnnnnnnnnnnnnnnnnnnnnnnnnnnnnnnnnnnnnnnnnnnnnnnnnnnnnnnnnnnnnnnnnnnnnnnnnnnnnnnnnnnnnnnnnnnnnnnnnnnnnnnnnnnnnnnnnnnnnnnnnnnnnnnnnnnnnnnnnnnnnnnnnnnnnnnnnnnnnnnnnnnnnnnnnnnnnnnnnnnnnnnnnnnnnnnnnnnnnnnnnnnnnnnnnnnnnnnnnnnnnnnnnnnnnnnnnnnnnnnnnnnnnnnnnnnnnnnnnnnnnnnnnnnnnnnnnnnnnnnnnnnnnnnnnnnnnnnnnnnnnnnnnnnnnnnnnnnnnnnnnnnnnnnnnnnnnnnnnnnnnnnnnnnnnnnnnnnnnnnnnnnnnnnnnnnnnnnnnnnnnnnnnnnnnnnnnnnnnnnnnnnnnnnnnnnnnnnnnnnnnnnnnnnnnnnnnnnnnnnnnnnnnnnnnnnnnnnnnnnnnnnnnnnnnnnnnnnnnnnnnnnnnnnnnnnnnnnnnnnnnnnnnnnnnnnnnnnnnnnnnnnnnnnnnnnnnnnnnnnnnnnnnnnnnnnnnnnnnnnnnnnnnnnnnnnnnnnnnnnnnnnnnnnnnnnnnnnnnnnnnnnnnnnnnnnnnnnnnnnnnnnnnnnnnnnnnnnnnnnnnnnnnnnnnnnnnnnnnnnnnnnnnnnnnnnnnnnnnnnnnnnnnnnnnnnnnnnnnnnnnnnnnnnnnnnnnnnnnnnnnnnnnnnnnnnnnnnnnnnnnnnnnnnnnnnnnnnnnnnnnnnnnnnnnnnnnnnnnnnnnnnnnnnnnnnnnnnnnnnnnnnnnnnnnnnnnnnnnnnnnnnnnnnnnnnnnnnnnnnnnnnnnnnnnnnnnnnnnnnnnnnnnnnnnnnnnnnnnnnnnnnnnnnnnnnnnnnnnnnnnnnnnnnnnnnnnnnnnnnnnnnnnnnnnnnnnnnnnnnnnnnnnnnnnnnnnnnnnnnnnnnnnnnnnnnnnnnnnnnnnnnnnnnnnnnnnnnnnnnnnnnnnnnnnnnnnnnnnnnnnnnnnnnnnnnnnnnnnnnnnnnnnnnnnnnnnnnnnnnnnnnnnnnnnnnnnnnnnnnnnnnnnnnnnnnnnnnnnnnnnnnnnnnnnnnnnnnnnnnnnnnnnnnnnnnnnnnnnnnnnnnnnnnnnnnnnnnnnnnnnnnnnnnnnnnnnnnnnnnnnnnnnnnnnnnnnnnnnnnnnnnnnnnnnnnnnnnnnnnnnnnnnnnnnnnnnnnnnnnnnnnnnnnnnnnnnnnnnnnnnnnnnnnnnnnnnnnnnnnnnnnnnnnnnnnnnnnnnnnnnnnnnnnnnnnnnnnnnnnnnnnnnnnnnnnnnnnnnnnnnnnnnnnnnnnnnnnnnnnnnnnnnnnnnnnnnnnnnnnnnnnnnnnnnnnnnnnnnnnnnnnnnnnnnnnnnnnnnnnnnnnnnnnnnnnnnnnnnnnnnnnnnnnnnnnnnnnnnnnnnnnnnnnnnnnnnnnnnnnnnnnnnnnnnnnnnnnnnnnnnnnnnnnnnnnnnnnnnnnnnnnnnnnnnnnnnnnnnnnnnnnnnnnnnnnnnnnnnnnnnnnnnnnnnnnnnnnnnnnnnnnnnnnnnnnnnnnnnnnnnnnnnnnnnnnnnnnnnnnnnnnnnnnnnnnnnnnnnnnnnnnnnnnnnnnnnnnnnnnnnnnnnnnnnnnnnnnnnnnnnnnnnnnnnnnnnnnnnnnnnnnnnnnnnnnnnnnnnnnnnnnnnnnnnnnnnnnnnnnnnnnnnnnnnnnnnnnnnnnnnnnnnnnnnnnnnnnnnnnnnnnnnnnnnnnnnnnnnnnnnnnnnnnnnnnnnnnnnnnnnnnnnnnnnnnnnnnnnnnnnnnnnnnnnnnnnnnnnnnnnnnnnnnnnnnnnnnnnnnnnnnnnnnnnnnnnnnnnnnnnnnnnnnnnnnnnnnnnnnnnnnnnnnnnnnnnnnnnnnnnnnnnnnnnnnnnnnnnnnnnnnnnnnnnnnnnnnnnnnnnnnnnnnnnnnnnnnnnnnnnnnnnnnnnnnnnnnnnnnnnnnnnnnnnnnnnnnnnnnnnnnnnnnnnnnnnnnnnnnnnnnnnnnnnnnnnnnnnnnnnnnnnnnnnnnnnnnnnnnnnnnnnnnnnnnnnnnnnnnnnnnnnnnnnnnnnnnnnnnnnnnnnnnnnnnnnnnnnnnnnnnnnnnnnnnnnnnnnnnnnnnnnnnnnnnnnnnnnnnnnnnnnnnnnnnnnnnnnnnnnnnnnnnnnnnnnnnnnnnnnnnnnnnnnnnnnnnnnnnnnnnnnnnnnnnnnnnnnnnnnnnnnnnnnnnnnnnnnnnnnnnnnnnnnnnnnnnnnnnnnnnnnnnnnnnnnnnnnnnnnnnnnnnnnnnnnnnnnnnnnnnnnnnnnnnnnnnnnnnnnnnnnnnnnnnnnnnnnnnnnnnnnnnnnnnnnnnnnnnnnnnnnnnnnnnnnnnnnnnnnnnnnnnnnnnnnnnnnnnnnnnnnnnnnnnnnnnnnnnnnnnnnnnnnnnnnnnnnnnnnnnnnnnnnnnnnnnnnnnnnnnnnnnnnnnnnnnnnnnnnnnnnnnnnnnnnnnnnnnnnnnnnnnnnnnnnnnnnnnnnnnnnnnnnnnnnnnnnnnnnnnnnnnnnnnnnnnnnnnnnnnnnnnnnnnnnnnnnnnnnnnnnnnnnnnnnnnnnnnnnnnnnnnnnnnnnnnnnnnnnnnnnnnnnnnnnnnnnnnnnnnnnnnnnnnnnnnnnnnnnnnnnnnnnnnnnnnnnnnnnnnnnnnnnnnnnnnnnnnnnnnnnnnnnnnnnnnnnnnnnnnnnnnnnnnnnnnnnnnnnnnnnnnnnnnnnnnnnnnnnnnnnnnnnnnnnnnnnnnnnnnnnnnnnnnnnnnnnnnnnnnnnnnnnnnnnnnnnnnnnnnnnnnnnnnnnnnnnnnnnnnnnnnnnnnnnnnnnnnnnnnnnnnnnnnnnnnnnnnnnnnnnnnnnnnnnnnnnnnnnnnnnnnnnnnnnnnnnnnnnnnnnnnnnnnnnnnnnnnnnnnnnnnnnnnnnnnnnnnnnnnnnnnnnnnnnnnnnnnnnnnnnnnnnnnnnnnnnnnnnnnnnnnnnnnnnnnnnnnnnnnnnnnnnnnnnnnnnnnnnnnnnnnnnnnnnnnnnnnnnnnnnnnnnnnnnnnnnnnnnnnnnnnnnnnnnnnnnnnnnnnnnnnnnnnnnnnnnnnnnnnnnnnnnnnnnnnnnnnnnnnnnnnnnnnnnnnnnnnnnnnnnnnnnnnnnnnnnnnnnnnnnnnnnnnnnnnnnnnnnnnnnnnnnnnnnnnnnnnnnnnnnnnnnnnnnnnnnnnnnnnnnnnnnnnnnnnnnnnnnnnnnnnnnnnnnnnnnnnnnnnnnnnnnnnnnnnnnnnnnnnnnnnnnnnnnnnnnnnnnnnnnnnnnnnnnnnnnnnnnnnnnnnnnnnnnnnnnnnnnnnnnnnnnnnnnnnnnnnnnnnnnnnnnnnnnnnnnnnnnnnnnnnnnnnnnnnnnnnnnnnnnnnnnnnnnnnnnnnnnnnnnnnnnnnnnnnnnnnnnnnnnnnnnnnnnnnnnnnnnnnnnnnnnnnnnnnnnnnnnnnnnnnnnnnnnnnnnnnnnnnnnnnnnnnnnnnnnnnnnnnnnnnnnnnnnnnnnnnnnnnnnnnnnnnnnnnnnnnnnnnnnnnnnnnnnnnnnnnnnnnnnnnnnnnnnnnnnnnnnnnnnnnnnnnnnnnnnnnnnnnnnnnnnnnnnnnnnnnnnnnnnnnnnnnnnnnnnnnnnnnnnnnnnnnnnnnnnnnnnnnnnnnnnnnnnnnnnnnnnnnnnnnnnnnnnnnnnnnnnnnnnnnnnnnnnnnnnnnnnnnnnnnnnnnnnnnnnnnnnnnnnnnnnnnnnnnnnnnnnnnnnnnnnnnnnnnnnnnnnnnnnnnnnnnnnnnnnnnnnnnnnnnnnnnnnnnnnnnnnnnnnnnnnnnnnnnnnnnnnnnnnnnnnnnnnnnnnnnnnnnnnnnnnnnnnnnnnnnnnnnnnnnnnnnnnnnnnnnnnnnnnnnnnnnnnnnnnnnnnnnnnnnnnnnnnnnnnnnnnnnnnnnnnnnnnnnnnnnnnnnnnnnnnnnnnnnnnnnnnnnnnnnnnnnnnnnnnnnnnnnnnnnnnnnnnnnnnnnnnnnnnnnnnnnnnnnnnnnnnnnnnnnnnnnnnnnnnnnnnnnnnnnnnnnnnnnnnnnnnnnnnnnnnnnnnnnnnnnnnnnnnnnnnnnnnnnnnnnnnnnnnnnnnnnnnnnnnnnnnnnnnnnnnnnnnnnnnnnnnnnnnnnnnnnnnnnnnnnnnnnnnnnnnnnnnnnnnnnnnnnnnnnnnnnnnnnnnnnnnnnnnnnnnnnnnnnnnnnnnnnnnnnnnnnnnnnnnnnnnnnnnnnnnnnnnnnnnnnnnnnnnnnnnnnnnnnnnnnnnnnnnnnnnnnnnnnnnnnnnnnnnnnnnnnnnnnnnnnnnnnnnnnnnnnnnnnnnnnnnnnnnnnnnnnnnnnnnnnnnnnnnnnnnnnnnnnnnnnnnnnnnnnnnnnnnnnnnnnnnnnnnnnnnnnnnnnnnnnnnnnnnnnnnnnnnnnnnnnnnnnnnnnnnnnnnnnnnnnnnnnnnnnnnnnnnnnnnnnnnnnnnnnnnnnnnnnnnnnnnnnnnnnnnnnnnnnnnnnnnnnnnnnnnnnnnnnnnnnnnnnnnnnnnnnnnnnnnnnnnnnnnnnnnnnnnnnnnnnnnnnnnnnnnnnnnnnnnnnnnnnnnnnnnnnnnnnnnnnnnnnnnnnnnnnnnnnnnnnnnnnnnnnnnnnnnnnnnnnnnnnnnnnnnnnnnnnnnnnnnnnnnnnnnnnnnnnnnnnnnnnnnnnnnnnnnnnnnnnnnnnnnnnnnnnnnnnnnnnnnnnnnnnnnnnnnnnnnnnnnnnnnnnnnnnnnnnnnnnnnnnnnnnnnnnnnnnnnnnnnnnnnnnnnnnnnnnnnnnnnnnnnnnnnnnnnnnnnnnnnnnnnnnnnnnnnnnnnnnnnnnnnnnnnnnnnnnnnnnnnnnnnnnnnnnnnnnnnnnnnnnnnnnnnnnnnnnnnnnnnnnnnnnnnnnnnnnnnnnnnnnnnnnnnnnnnnnnnnnnnnnnnnnnnnnnnnnnnnnnnnnnnnnnnnnnnnnnnnnnnnnnnnnnnnnnnnnnnnnnnnnnnnnnnnnnnnnnnnnnnnnnnnnnnnnnnnnnnnnnnnnnnnnnnnnnnnnnnnnnnnnnnnnnnnnnnnnnnnnnnnnnnnnnnnnnnnnnnnnnnnnnnnnnnnnnnnnnnnnnnnnnnnnnnnnnnnnnnnnnnnnnnnnnnnnnnnnnnnnnnnnnnnnnnnnnnnnnnnnnnnnnnnnnnnnnnnnnnnnnnnnnnnnnnnnnnnnnnnnnnnnnnnnnnnnnnnnnnnnnnnnnnnnnnnnnnnnnnnnnnnnnnnnnnnnnnnnnnnnnnnnnnnnnnnnnnnnnnnnnnnnnnnnnnnnnnnnnnnnnnnnnnnnnnnnnnnnnnnnnnnnnnnnnnnnnnnnnnnnnnnnnnnnnnnnnnnnnnnnnnnnnnnnnnnnnnnnnnnnnnnnnnnnnnnnnnnnnnnnnnnnnnnnnnnnnnnnnnnnnnnnnnnnnnnnnnnnnnnnnnnnnnnnnnnnnnnnnnnnnnnnnnnnnnnnnnnnnnnnnnnnnnnnnnnnnnnnnnnnnnnnnnnnnnnnnnnnnnnnnnnnnnnnnnnnnnnnnnnnnnnnnnnnnnnnnnnnnnnnnnnnnnnnnnnnnnnnnnnnnnnnnnnnnnnnnnnnnnnnnnnnnnnnnnnnnnnnnnnnnnnnnnnnnnnnnnnnnnnnnnnnnnnnnnnnnnnnnnnnnnnnnnnnnnnnnnnnnnnnnnnnnnnnnnnnnnnnnnnnnnnnnnnnnnnnnnnnnnnnnnnnnnnnnnnnnnnnnnnnnnnnnnnnnnnnnnnnnnnnnnnnnnnnnnnnnnnnnnnnnnnnnnnnnnnnnnnnnnnnnnnnnnnnnnnnnnnnnnnnnnnnnnnnnnnnnnnnnnnnnnnnnnnnnnnnnnnnnnnnnnnnnnnnnnnnnnnnnnnnnnnnnnnnnnnnnnnnnnnnnnnnnnnnnnnnnnnnnnnnnnnnnnnnnnnnnnnnnnnnnnnnnnnnnnnnnnnnnnnnnnnnnnnnnnnnnnnnnnnnnnnnnnnnnnnnnnnnnnnnnnnnnnnnnnnnnnnnnnnnnnnnnnnnnnnnnnnnnnnnnnnnnnnnnnnnnnnnnnnnnnnnnnnnnnnnnnnnnnnnnnnnnnnnnnnnnnnnnnnnnnnnnnnnnnnnnnnnnnnnnnnnnnnnnnnnnnnnnnnnnnnnnnnnnnnnnnnnnnnnnnnnnnnnnnnnnnnnnnnnnnnnnnnnnnnnnnnnnnnnnnnnnnnnnnnnnnnnnnnnnnnnnnnnnnnnnnnnnnnnnnnnnnnnnnnnnnnnnnnnnnnnnnnnnnnnnnnnnnnnnnnnnnnnnnnnnnnnnnnnnnnnnnnnnnnnnnnnnnnnnnnnnnnnnnnnnnnnnnnnnnnnnnnnnnnnnnnnnnnnnnnnnnnnnnnnnnnnnnnnnnnnnnnnnnnnnnnnnnnnnnnnnnnnnnnnnnnnnnnnnnnnnnnnnnnnnnnnnnnnnnnnnnnnnnnnnnnnnnnnnnnnnnnnnnnnnnnnnnnnnnnnnnnnnnnnnnnnnnnnnnnnnnnnnnnnnnnnnnnnnnnnnnnnnnnnnnnnnnnnnnnnnnnnnnnnnnnnnnnnnnnnnnnnnnnnnnnnnnnnnnnnnnnnnnnnnnnnnnnnnnnnnnnnnnnnnnnnnnnnnnnnnnnnnnnnnnnnnnnnnnnnnnnnnnnnnnnnnnnnnnnnnnnnnnnnnnnnnnnnnnnnnnnnnnnnnnnnnnnnnnnnnnnnnnnnnnnnnnnnnnnnnnnnnnnnnnnnnnnnnnnnnnnnnnnnnnnnnnnnnnnnnnnnnnnnnnnnnnnnnnnnnnnnnnnnnnnnnnnnnnnnnnnnnnnnnnnnnnnnnnnnnnnnnnnnnnnnnnnnnnnnnnnnnnnnnnnnnnnnnnnnnnnnnnnnnnnnnnnnnnnnnnnnnnnnnnnnnnnnnnnnnnnnnnnnnnnnnnnnnnnnnnnnnnnnnnnnnnnnnnnnnnnnnnnnnnnnnnnnnnnnnnnnnnnnnnnnnnnnnnnnnnnnnnnnnnnnnnnnnnnnnnnnnnnnnnnnnnnnnnnnnnnnnnnnnnnnnnnnnnnnnnnnnnnnnnnnnnnnnnnnnnnnnnnnnnnnnnnnnnnnnnnnnnnnnnnnnnnnnnnnnnnnnnnnnnnnnnnnnnnnnnnnnnnnnnnnnnnnnnnnnnnnnnnnnnnnnnnnnnnnnnnnnnnnnnnnnnnnnnnnnnnnnnnnnnnnnnnnnnnnnnnnnnnnnnnnnnnnnnnnnnnnnnnnnnnnnnnnnnnnnnnnnnnnnnnnnnnnnnnnnnnnnnnnnnnnnnnnnnnnnnnnnnnnnnnnnnnnnnnnnnnnnnnnnnnnnnnnnnnnnnnnnnnnnnnnnnnnnnnnnnnnnnnnnnnnnnnnnnnnnnnnnnnnnnnnnnnnnnnnnnnnnnnnnnnnnnnnnnnnnnnnnnnnnnnnnnnnnnnnnnnnnnnnnnnnnnnnnnnnnnnnnnnnnnnnnnnnnnnnnnnnnnnnnnnnnnnnnnnnnnnnnnnnnnnnnnnnnnnnnnnnnnnnnnnnnnnnnnnnnnnnnnnnnnnnnnnnnnnnnnnnnnnnnnnnnnnnnnnnnnnnnnnnnnnnnnnnnnnnnnnnnnnnnnnnnnnnnnnnnnnnnnnnnnnnnnnnnnnnnnnnnnnnnnnnnnnnnnnnnnnnnnnnnnnnnnnnnnnnnnnnnnnnnnnnnnnnnnnnnnnnnnnnnnnnnnnnnnnnnnnnnnnnnnnnnnnnnnnnnnnnnnnnnnnnnnnnnnnnnnnnnnnnnnnnnnnnnnnnnnnnnnnnnnnnnnnnnnnnnnnnnnnnnnnnnnnnnnnnnnnnnnnnnnnnnnnnnnnnnnnnnnnnnnnnnnnnnnnnnnnnnnnnnnnnnnnnnnnnnnnnnnnnnnnnnnnnnnnnnnnnnnnnnnnnnnnnnnnnnnnnnnnnnnnnnnnnnnnnnnnnnnnnnnnnnnnnnnnnnnnnnnnnnnnnnnnnnnnnnnnnnnnnnnnnnnnnnnnnnnnnnnnnnnnnnnnnnnnnnnnnnnnnnnnnnnnnnnnnnnnnnnnnnnnnnnnnnnnnnnnnnnnnnnnnnnnnnnnnnnnnnnnnnnnnnnnnnnnnnnnnnnnnnnnnnnnnnnnnnnnnnnnnnnnnnnnnnnnnnnnnnnnnnnnnnnnnnnnnnnnnnnnnnnnnnnnnnnnnnnnnnnnnnnnnnnnnnnnnnnnnnnnnnnnnnnnnnnnnnnnnnnnnnnnnnnnnnnnnnnnnnnnnnnnnnnnnnnnnnnnnnnnnnnnnnnnnnnnnnnnnnnnnnnnnnnnnnnnnnnnnnnnnnnnnnnnnnnnnnnnnnnnnnnnnnnnnnnnnnnnnnnnnnnnnnnnnnnnnnnnnnnnnnnnnnnnnnnnnnnnnnnnnnnnnnnnnnnnnnnnnnnnnnnnnnnnnnnnnnnnnnnnnnnnnnnnnnnnnnnnnnnnnnnnnnnnnnnnnnnnnnnnnnnnnnnnnnnnnnnnnnnnnnnnnnnnnnnnnnnnnnnnnnnnnnnnnnnnnnnnnnnnnnnnnnnnnnnnnnnnnnnnnnnnnnnnnnnnnnnnnnnnnnnnnnnnnnnnnnnnnnnnnnnnnnnnnnnnnnnnnnnnnnnnnnnnnnnnnnnnnnnnnnnnnnnnnnnnnnnnnnnnnnnnnnnnnnnnnnnnnnnnnnnnnnnnnnnnnnnnnnnnnnnnnnnnnnnnnnnnnnnnnnnnnnnnnnnnnnnnnnnnnnnnnnnnnnnnnnnnnnnnnnnnnnnnnnnnnnnnnnnnnnnnnnnnnnnnnnnnnnnnnnnnnnnnnnnnnnnnnnnnnnnnnnnnnnnnnnnnnnnnnnnnnnnnnnnnnnnnnnnnnnnnnnnnnnnnnnnnnnnnnnnnnnnnnnnnnnnnnnnnnnnnnnnnnnnnnnnnnnnnnnnnnnnnnnnnnnnnnnnnnnnnnnnnnnnnnnnnnnnnnnnnnnnnnnnnnnnnnnnnnnnnnnnnnnnnnnnnnnnnnnnnnnnnnnnnnnnnnnnnnnnnnnnnnnnnnnnnnnnnnnnnnnnnnnnnnnnnnnnnnnnnnnnnnnnnnnnnnnnnnnnnnnnnnnnnnnnnnnnnnnnnnnnnnnnnnnnnnnnnnnnnnnnnnnnnnnnnnnnnnnnnnnnnnnnnnnnnnnnnnnnnnnnnnnnnnnnnnnnnnnnnnnnnnnnnnnnnnnnnnnnnnnnnnnnnnnnnnnnnnnnnnnnnnnnnnnnnnnnnnnnnnnnnnnnnnnnnnnnnnnnnnnnnnnnnnnnnnnnnnnnnnnnnnnnnnnnnnnnnnnnnnnnnnnnnnnnnnnnnnnnnnnnnnnnnnnnnnnnnnnnnnnnnnnnnnnnnnnnnnnnnnnnnnnnnnnnnnnnnnnnnnnnnnnnnnnnnnnnnnnnnnnnnnnnnnnnnnnnnnnnnnnnnnnnnnnnnnnnnnnnnnnnnnnnnnnnnnnnnnnnnnnnnnnnnnnnnnnnnnnnnnnnnnnnnnnnnnnnnnnnnnnnnnnnnnnnnnnnnnnnnnnnnnnnnnnnnnnnnnnnnnnnnnnnnnnnnnnnnnnnnnnnnnnnnnnnnnnnnnnnnnnnnnnnnnnnnnnnnnnnnnnnnnnnnnnnnnnnnnnnnnnnnnnnnnnnnnnnnnnnnnnnnnnnnnnnnnnnnnnnnnnnnnnnnnnnnnnnnnnnnnnnnnnnnnnnnnnnnnnnnnnnnnnnnnnnnnnnnnnnnnnnnnnnnnnnnnnnnnnnnnnnnnnnnnnnnnnnnnnnnnnnnnnnnnnnnnnnnnnnnnnnnnnnnnnnnnnnnnnnnnnnnnnnnnnnnnnnnnnnnnnnnnnnnnnnnnnnnnnnnnnnnnnnnnnnnnnnnnnnnnnnnnnnnnnnnnnnnnnnnnnnnnnnnnnnnnnnnnnnnnnnnnnnnnnnnnnnnnnnnnnnnnnnnnnnnnnnnnnnnnnnnnnnnnnnnnnnnnnnnnnnnnnnnnnnnnnnnnnnnnnnnnnnnnnnnnnnnnnnnnnnnnnnnnnnnnnnnnnnnnnnnnnnnnnnnnnnnnnnnnnnnnnnnnnnnnnnnnnnnnnnnnnnnnnnnnnnnnnnnnnnnnnnnnnnnnnnnnnnnnnnnnnnnnnnnnnnnnnnnnnnnnnnnnnnnnnnnnnnnnnnnnnnnnnnnnnnnnnnnnnnnnnnnnnnnnnnnnnnnnnnnnnnnnnnnnnnnnnnnnnnnnnnnnnnnnnnnnnnnnnnnnnnnnnnnnnnnnnnnnnnnnnnnnnnnnnnnnnnnnnnnnnnnnnnnnnnnnnnnnnnnnnnnnnnnnnnnnnnnnnnnnnnnnnnnnnnnnnnnnnnnnnnnnnnnnnnnnnnnnnnnnnnnnnnnnnnnnnnnnnnnnnnnnnnnnnnnnnnnnnnnnnnnnnnnnnnnnnnnnnnnnnnnnnnnnnnnnnnnnnnnnnnnnnnnnnnnnnnnnnnnnnnnnnnnnnnnnnnnnnnnnnnnnnnnnnnnnnnnnnnnnnnnnnnnnnnnnnnnnnnnnnnnnnnnnnnnnnnnnnnnnnnnnnnnnnnnnnnnnnnnnnnnnnnnnnnnnnnnnnnnnnnnnnnnnnnnnnnnnnnnnnnnnnnnnnnnnnnnnnnnnnnnnnnnnnnnnnnnnnnnnnnnnnnnnnnnnnnnnnnnnnnnnnnnnnnnnnnnnnnnnnnnnnnnnnnnnnnnnnnnnnnnnnnnnnnnnnnnnnnnnnnnnnnnnnnnnnnnnnnnnnnnnnnnnnnnnnnnnnnnnnnnnnnnnnnnnnnnnnnnnnnnnnnnnnnnnnnnnnnnnnnnnnnnnnnnnnnnnnnnnnnnnnnnnnnnnnnnnnnnnnnnnnnnnnnnnnnnnnnnnnnnnnnnnnnnnnnnnnnnnnnnnnnnnnnnnnnnnnnnnnnnnnnnnnnnnnnnnnnnnnnnnnnnnnnnnnnnnnnnnnnnnnnnnnnnnnnnnnnnnnnnnnnnnnnnnnnnnnnnnnnnnnnnnnnnnnnnnnnnnnnnnnnnnnnnnnnnnnnnnnnnnnnnnnnnnnnnnnnnnnnnnnnnnnnnnnnnnnnnnnnnnnnnnnnnnnnnnnnnnnnnnnnnnnnnnnnnnnnnnnnnnnnnnnnnnnnnnnnnnnnnnnnnnnnnnnnnnnnnnnnnnnnnnnnnnnnnnnnnnnnnnnnnnnnnnnnnnnnnnnnnnnnnnnnnnnnnnnnnnnnnnnnnnnnnnnnnnnnnnnnnnnnnnnnnnnnnnnnnnnnnnnnnnnnnnnnnnnnnnnnnnnnnnnnnnnnnnnnnnnnnnnnnnnnnnnnnnnnnnnnnnnnnnnnnnnnnnnnnnnnnnnnnnnnnnnnnnnnnnnnnnnnnnnnnnnnnnnnnnnnnnnnnnnnnnnnnnnnnnnnnnnnnnnnnnnnnnnnnnnnnnnnnnnnnnnnnnnnnnnnnnnnnnnnnnnnnnnnnnnnnnnnnnnnnnnnnnnnnnnnnnnnnnnnnnnnnnnnnnnnnnnnnnnnnnnnnnnnnnnnnnnnnnnnnnnnnnnnnnnnnnnnnnnnnnnnnnnnnnnnnnnnnnnnnnnnnnnnnnnnnnnnnnnnnnnnnnnnnnnnnnnnnnnnnnnnnnnnnnnnnnnnnnnnnnnnnnnnnnnnnnnnnnnnnnnnnnnnnnnnnnnnnnnnnnnnnnnnnnnnnnnnnnnnnnnnnnnnnnnnnnnnnnnnnnnnnnnnnnnnnnnnnnnnnnnnnnnnnnnnnnnnnnnnnnnnnnnnnnnnnnnnnnnnnnnnnnnnnnnnnnnnnnnnnnnnnnnnnnnnnnnnnnnnnnnnnnnnnnnnnnnnnnnnnnnnnnnnnnnnnnnnnnnnnnnnnnnnnnnnnnnnnnnnnnnnnnnnnnnnnnnnnnnnnnnnnnnnnnnnnnnnnnnnnnnnnnnnnnnnnnnnnnnnnnnnnnnnnnnnnnnnnnnnnnnnnnnnnnnnnnnnnnnnnnnnnnnnnnnnnnnnnnnnnnnnnnnnnnnnnnnnnnnnnnnnnnnnnnnnnnnnnnnnnnnnnnnnnnnnnnnnnnnnnnnnnnnnnnnnnnnnnnnnnnnnnnnnnnnnnnnnnnnnnnnnnnnnnnnnnnnnnnnnnnnnnnnnnnnnnnnnnnnnnnnnnnnnnnnnnnnnnnnnnnnnnnnnnnnnnnnnnnnnnnnnnnnnnnnnnnnnnnnnnnnnnnnnnnnnnnnnnnnnnnnnnnnnnnnnnnnnnnnnnnnnnnnnnnnnnnnnnnnnnnnnnnnnnnnnnnnnnnnnnnnnnnnnnnnnnnnnnnnnnnnnnnnnnnnnnnnnnnnnnnnnnnnnnnnnnnnnnnnnnnnnnnnnnnnnnnnnnnnnnnnnnnnnnnnnnnnnnnnnnnnnnnnnnnnnnnnnnnnnnnnnnnnnnnnnnnnnnnnnnnnnnnnnnnnnnnnnnnnnnnnnnnnnnnnnnnnnnnnnnnnnnnnnnnnnnnnnnnnnnnnnnnnnnnnnnnnnnnnnnnnnnnnnnnnnnnnnnnnnnnnnnnnnnnnnnnnnnnnnnnnnnnnnnnnnnnnnnnnnnnnnnnnnnnnnnnnnnnnnnnnnnnnnnnnnnnnnnnnnnnnnnnnnnnnnnnnnnnnnnnnnnnnnnnnnnnnnnnnnnnnnnnnnnnnnnnnnnnnnnnnnnnnnnnnnnnnnnnnnnnnnnnnnnnnnnnnnnnnnnnnnnnnnnnnnnnnnnnnnnnnnnnnnnnnnnnnnnnnnnnnnnnnnnnnnnnnnnnnnnnnnnnnnnnnnnnnnnnnnnnnnnnnnnnnnnnnnnnnnnnnnnnnnnnnnnnnnnnnnnnnnnnnnnnnnnnnnnnnnnnnnnnnnnnnnnnnnnnnnnnnnnnnnnnnnnnnnnnnnnnnnnnnnnnnnnnnnnnnnnnnnnnnnnnnnnnnnnnnnnnnnnnnnnnnnnnnnnnnnnnnnnnnnnnnnnnnnnnnnnnnnnnnnnnnnnnnnnnnnnnnnnnnnnnnnnnnnnnnnnnnnnnnnnnnnnnnnnnnnnnnnnnnnnnnnnnnnnnnnnnnnnnnnnnnnnnnnnnnnnnnnnnnnnnnnnnnnnnnnnnnnnnnnnnnnnnnnnnnnnnnnnnnnnnnnnnnnnnnnnnnnnnnnnnnnnnnnnnnnnnnnnnnnnnnnnnnnnnnnnnnnnnnnnnnnnnnnnnnnnnnnnnnnnnnnnnnnnnnnnnnnnnnnnnnnnnnnnnnnnnnnnnnnnnnnnnnnnnnnnnnnnnnnnnnnnnnnnnnnnnnnnnnnnnnnnnnnnnnnnnnnnnnnnnnnnnnnnnnnnnnnnnnnnnnnnnnnnnnnnnnnnnnnnnnnnnnnnnnnnnnnnnnnnnnnnnnnnnnnnnnnnnnnnnnnnnnnnnnnnnnnnnnnnnnnnnnnnnnnnnnnnnnnnnnnnnnnnnnnnnnnnnnnnnnnnnnnnnnnnnnnnnnnnnnnnnnnnnnnnnnnnnnnnnnnnnnnnnnnnnnnnnnnnnnnnnnnnnnnnnnnnnnnnnnnnnnnnnnnnnnnnnnnnnnnnnnnnnnnnnnnnnnnnnnnnnnnnnnnnnnnnnnnnnnnnnnnnnnnnnnnnnnnnnnnnnnnnnnnnnnnnnnnnnnnnnnnnnnnnnnnnnnnnnnnnnnnnnnnnnnnnnnnnnnnnnnnnnnnnnnnnnnnnnnnnnnnnnnnnnnnnnnnnnnnnnnnnnnnnnnnnnnnnnnnnnnnnnnnnnnnnnnnnnnnnnnnnnnnnnnnnnnnnnnnnnnnnnnnnnnnnnnnnnnnnnnnnnnnnnnnnnnnnnnnnnnnnnnnnnnnnnnnnnnnnnnnnnnnnnnnnnnnnnnnnnnnnnnnnnnnnnnnnnnnnnnnnnnnnnnnnnnnnnnnnnnnnnnnnnnnnnnnnnnnnnnnnnnnnnnnnnnnnnnnnnnnnnnnnnnnnnnnnnnnnnnnnnnnnnnnnnnnnnnnnnnnnnnnnnnnnnnnnnnnnnnnnnnnnnnnnnnnnnnnnnnnnnnnnnnnnnnnnnnnnnnnnnnnnnnnnnnnnnnnnnnnnnnnnnnnnnnnnnnnnnnnnnnnnnnnnnnnnnnnnnnnnnnnnnnnnnnnnnnnnnnnnnnnnnnnnnnnnnnnnnnnnnnnnnnnnnnnnnnnnnnnnnnnnnnnnnnnnnnnnnnnnnnnnnnnnnnnnnnnnnnnnnnnnnnnnnnnnnnnnnnnnnnnnnnnnnnnnnnnnnnnnnnnnnnnnnnnnnnnnnnnnnnnnnnnnnnnnnnnnnnnnnnnnnnnnnnnnnnnnnnnnnnnnnnnnnnnnnnnnnnnnnnnnnnnnnnnnnnnnnnnnnnnnnnnnnnnnnnnnnnnnnnnnnnnnnnnnnnnnnnnnnnnnnnnnnnnnnnnnnnnnnnnnnnnnnnnnnnnnnnnnnnnnnnnnnnnnnnnnnnnnnnnnnnnnnnnnnnnnnnnnnnnnnnnnnnnnnnnnnnnnnnnnnnnnnnnnnnnnnnnnnnnnnnnnnnnnnnnnnnnnnnnnnnnnnnnnnnnnnnnnnnnnnnnnnnnnnnnnnnnnnnnnnnnnnnnnnnnnnnnnnnnnnnnnnnnnnnnnnnnnnnnnnnnnnnnnnnnnnnnnnnnnnnnnnnnnnnnnnnnnnnnnnnnnnnnnnnnnnnnnnnnnnnnnnnnnnnnnnnnnnnnnnnnnnnnnnnnnnnnnnnnnnnnnnnnnnnnnnnnnnnnnnnnnnnnnnnnnnnnnnnnnnnnnnnnnnnnnnnnnnnnnnnnnnnnnnnnnnnnnnnnnnnnnnnnnnnnnnnnnnnnnnnnnnnnnnnnnnnnnnnnnnnnnnnnnnnnnnnnnnnnnnnnnnnnnnnnnnnnnnnnnnnnnnnnnnnnnnnnnnnnnnnnnnnnnnnnnnnnnnnnnnnnnnnnnnnnnnnnnnnnnnnnnnnnnnnnnnnnnnnnnnnnnnnnnnnnnnnnnnnnnnnnnnnnnnnnnnnnnnnnnnnnnnnnnnnnnnnnnnnnnnnnnnnnnnnnnnnnnnnnnnnnnnnnnnnnnnnnnnnnnnnnnnnnnnnnnnnnnnnnnnnnnnnnnnnnnnnnnnnnnnnnnnnnnnnnnnnnnnnnnnnnnnnnnnnnnnnnnnnnnnnnnnnnnnnnnnnnnnnnnnnnnnnnnnnnnnnnnnnnnnnnnnnnnnnnnnnnnnnnnnnnnnnnnnnnnnnnnnnnnnnnnnnnnnnnnnnnnnnnnnnnnnnnnnnnnnnnnnnnnnnnnnnnnnnnnnnnnnnnnnnnnnnnnnnnnnnnnnnnnnnnnnnnnnnnnnnnnnnnnnnnnnnnnnnnnnnnnnnnnnnnnnnnnnnnnnnnnnnnnnnnnnnnnnnnnnnnnnnnnnnnnnnnnnnnnnnnnnnnnnnnnnnnnnnnnnnnnnnnnnnnnnnnnnnnnnnnnnnnnnnnnnnnnnnnnnnnnnnnnnnnnnnnnnnnnnnnnnnnnnnnnnnnnnnnnnnnnnnnnnnnnnnnnnnnnnnnnnnnnnnnnnnnnnnnnnnnnnnnnnnnnnnnnnnnnnnnnnnnnnnnnnnnnnnnnnnnnnnnnnnnnnnnnnnnnnnnnnnnnnnnnnnnnnnnnnnnnnnnnnnnnnnnnnnnnnnnnnnnnnnnnnnnnnnnnnnnnnnnnnnnnnnnnnnnnnnnnnnnnnnnnnnnnnnnnnnnnnnnnnnnnnnnnnnnnnnnnnnnnnnnnnnnnnnnnnnnnnnnnnnnnnnnnnnnnnnnnnnnnnnnnnnnnnnnnnnnnnnnnnnnnnnnnnnnnnnnnnnnnnnnnnnnnnnnnnnnnnnnnnnnnnnnnnnnnnnnnnnnnnnnnnnnnnnnnnnnnnnnnnnnnnnnnnnnnnnnnnnnnnnnnnnnnnnnnnnnnnnnnnnnnnnnnnnnnnnnnnnnnnnnnnnnnnnnnnnnnnnnnnnnnnnnnnnnnnnnnnnnnnnnnnnnnnnnnnnnnnnnnnnnnnnnnnnnnnnnnnnnnnnnnnnnnnnnnnnnnnnnnnnnnnnnnnnnnnnnnnnnnnnnnnnnnnnnnnnnnnnnnnnnnnnnnnnnnnnnnnnnnnnnnnnnnnnnnnnnnnnnnnnnnnnnnnnnnnnnnnnnnnnnnnnnnnnnnnnnnnnnnnnnnnnnnnnnnnnnnnnnnnnnnnnnnnnnnnnnnnnnnnnnnnnnnnnnnnnnnnnnnnnnnnnnnnnnnnnnnnnnnnnnnnnnnnnnnnnnnnnnnnnnnnnnnnnnnnnnnnnnnnnnnnnnnnnnnnnnnnnnnnnnnnnnnnnnnnnnnnnnnnnnnnnnnnnnnnnnnnnnnnnnnnnnnnnnnnnnnnnnnnnnnnnnnnnnnnnnnnnnnnnnnnnnnnnnnnnnnnnnnnnnnnnnnnnnnnnnnnnnnnnnnnnnnnnnnnnnnnnnnnnnnnnnnnnnnnnnnnnnnnnnnnnnnnnnnnnnnnnnnnnnnnnnnnnnnnnnnnnnnnnnnnnnnnnnnnnnnnnnnnnnnnnnnnnnnnnnnnnnnnnnnnnnnnnnnnnnnnnnnnnnnnnnnnnnnnnnnnnnnnnnnnnnnnnnnnnnnnnnnnnnnnnnnnnnnnnnnnnnnnnnnnnnnnnnnnnnnnnnnnnnnnnnnnnnnnnnnnnnnnnnnnnnnnnnnnnnnnnnnnnnnnnnnnnnnnnnnnnnnnnnnnnnnnnnnnnnnnnnnnnnnnnnnnnnnnnnnnnnnnnnnnnnnnnnnnnnnnnnnnnnnnnnnnnnnnnnnnnnnnnnnnnnnnnnnnnnnnnnnnnnnnnnnnnnnnnnnnnnnnnnnnnnnnnnnnnnnnnnnnnnnnnnnnnnnnnnnnnnnnnnnnnnnnnnnnnnnnnnnnnnnnnnnnnnnnnnnnnnnnnnnnnnnnnnnnnnnnnnnnnnnnnnnnnnnnnnnnnnnnnnnnnnnnnnnnnnnnnnnnnnnnnnnnnnnnnnnnnnnnnnnnnnnnnnnnnnnnnnnnnnnnnnnnnnnnnnnnnnnnnnnnnnnnnnnnnnnnnnnnnnnnnnnnnnnnnnnnnnnnnnnnnnnnnnnnnnnnnnnnnnnnnnnnnnnnnnnnnnnnnnnnnnnnnnnnnnnnnnnnnnnnnnnnnnnnnnnnnnnnnnnnnnnnnnnnnnnnnnnnnnnnnnnnnnnnnnnnnnnnnnnnnnnnnnnnnnnnnnnnnnnnnnnnnnnnnnnnnnnnnnnnnnnnnnnnnnnnnnnnnnnnnnnnnnnnnnnnnnnnnnnnnnnnnnnnnnnnnnnnnnnnnnnnnnnnnnnnnnnnnnnnnnnnnnnnnnnnnnnnnnnnnnnnnnnnnnnnnnnnnnnnnnnnnnnnnnnnnnnnnnnnnnnnnnnnnnnnnnnnnnnnnnnnnnnnnnnnnnnnnnnnnnnnnnnnnnnnnnnnnnnnnnnnnnnnnnnnnnnnnnnnnnnnnnnnnnnnnnnnnnnnnnnnnnnnnnnnnnnnnnnnnnnnnnnnnnnnnnnnnnnnnnnnnnnnnnnnnnnnnnnnnnnnnnnnnnnnnnnnnnnnnnnnnnnnnnnnnnnnnnnnnnnnnnnnnnnnnnnnnnnnnnnnnnnnnnnnnnnnnnnnnnnnnnnnnnnnnnnnnnnnnnnnnnnnnnnnnnnnnnnnnnnnnnnnnnnnnnnnnnnnnnnnnnnnnnnnnnnnnnnnnnnnnnnnnnnnnnnnnnnnnnnnnnnnnnnnnnnnnnnnnnnnnnnnnnnnnnnnnnnnnnnnnnnnnnnnnnnnnnnnnnnnnnnnnnnnnnnnnnnnnnnnnnnnnnnnnnnnnnnnnnnnnnnnnnnnnnnnnnnnnnnnnnnnnnnnnnnnnnnnnnnnnnnnnnnnnnnnnnnnnnnnnnnnnnnnnnnnnnnnnnnnnnnnnnnnnnnnnnnnnnnnnnnnnnnnnnnnnnnnnnnnnnnnnnnnnnnnnnnnnnnnnnnnnnnnnnnnnnnnnnnnnnnnnnnnnnnnnnnnnnnnnnnnnnnnnnnnnnnnnnnnnnnnnnnnnnnnnnnnnnnnnnnnnnnnnnnnnnnnnnnnnnnnnnnnnnnnnnnnnnnnnnnnnnnnnnnnnnnnnnnnnnnnnnnnnnnnnnnnnnnnnnnnnnnnnnnnnnnnnnnnnnnnnnnnnnnnnnnnnnnnnnnnnnnnnnnnnnnnnnnnnnnnnnnnnnnnnnnnnnnnnnnnnnnnnnnnnnnnnnnnnnnnnnnnnnnnnnnnnnnnnnnnnnnnnnnnnnnnnnnnnnnnnnnnnnnnnnnnnnnnnnnnnnnnnnnnnnnnnnnnnnnnnnnnnnnnnnnnnnnnnnnnnnnnnnnnnnnnnnnnnnnnnnnnnnnnnnnnnnnnnnnnnnnnnnnnnnnnnnnnnnnnnnnnnnnnnnnnnnnnnnnnnnnnnnnnnnnnnnnnnnnnnnnnnnnnnnnnnnnnnnnnnnnnnnnnnnnnnnnnnnnnnnnnnnnnnnnnnnnnnnnnnnnnnnnnnnnnnnnnnnnnnnnnnnnnnnnnnnnnnnnnnnnnnnnnnnnnnnnnnnnnnnnnnnnnnnnnnnnnnnnnnnnnnnnnnnnnnnnnnnnnnnnnnnnnnnnnnnnnnnnnnnnnnnnnnnnnnnnnnnnnnnnnnnnnnnnnnnnnnnnnnnnnnnnnnnnnnnnnnnnnnnnnnnnnnnnnnnnnnnnnnnnnnnnnnnnnnnnnnnnnnnnnnnnnnnnnnnnnnnnnnnnnnnnnnnnnnnnnnnnnnnnnnnnnnnnnnnnnnnnnnnnnnnnnnnnnnnnnnnnnnnnnnnnnnnnnnnnnnnnnnnnnnnnnnnnnnnnnnnnnnnnnnnnnnnnnnnnnnnnnnnnnnnnnnnnnnnnnnnnnnnnnnnnnnnnnnnnnnnnnnnnnnnnnnnnnnnnnnnnnnnnnnnnnnnnnnnnnnnnnnnnnnnnnnnnnnnnnnnnnnnnnnnnnnnnnnnnnnnnnnnnnnnnnnnnnnnnnnnnnnnnnnnnnnnnnnnnnnnnnnnnnnnnnnnnnnnnnnnnnnnnnnnnnnnnnnnnnnnnnnnnnnnnnnnnnnnnnnnnnnnnnnnnnnnnnnnnnnnnnnnnnnnnnnnnnnnnnnnnnnnnnnnnnnnnnnnnnnnnnnnnnnnnnnnnnnnnnnnnnnnnnnnnnnnnnnnnnnnnnnnnnnnnnnnnnnnnnnnnnnnnnnnnnnnnnnnnnnnnnnnnnnnnnnnnnnnnnnnnnnnnnnnnnnnnnnnnnnnnnnnnnnnnnnnnnnnnnnnnnnnnnnnnnnnnnnnnnnnnnnnnnnnnnnnnnnnnnnnnnnnnnnnnnnnnnnnnnnnnnnnnnnnnnnnnnnnnnnnnnnnnnnnnnnnnnnnnnnnnnnnnnnnnnnnnnnnnnnnnnnnnnnnnnnnnnnnnnnnnnnnnnnnnnnnnnnnnnnnnnnnnnnnnnnnnnnnnnnnnnnnnnnnnnnnnnnnnnnnnnnnnnnnnnnnnnnnnnnnnnnnnnnnnnnnnnnnnnnnnnnnnnnnnnnnnnnnnnnnnnnnnnnnnnnnnnnnnnnnnnnnnnnnnnnnnnnnnnnnnnnnnnnnnnnnnnnnnnnnnnnnnnnnnnnnnnnnnnnnnnnnnnnnnnnnnnnnnnnnnnnnnnnnnnnnnnnnnnnnnnnnnnnnnnnnnnnnnnnnnnnnnnnnnnnnnnnnnnnnnnnnnnnnnnnnnnnnnnnnnnnnnnnnnnnnnnnnnnnnnnnnnnnnnnnnnnnnnnnnnnnnnnnnnnnnnnnnnnnnnnnnnnnnnnnnnnnnnnnnnnnnnnnnnnnnnnnnnnnnnnnnnnnnnnnnnnnnnnnnnnnnnnnnnnnnnnnnnnnnnnnnnnnnnnnnnnnnnnnnnnnnnnnnnnnnnnnnnnnnnnnnnnnnnnnnnnnnnnnnnnnnnnnnnnnnnnnnnnnnnnnnnnnnnnnnnnnnnnnnnnnnnnnnnnnnnnnnnnnnnnnnnnnnnnnnnnnnnnnnnnnnnnnnnnnnnnnnnnnnnnnnnnnnnnnnnnnnnnnnnnnnnnnnnnnnnnnnnnnnnnnnnnnnnnnnnnnnnnnnnnnnnnnnnnnnnnnnnnnnnnnnnnnnnnnnnnnnnnnnnnnnnnnnnnnnnnnnnnnnnnnnnnnnnnnnnnnnnnnnnnnnnnnnnnnnnnnnnnnnnnnnnnnnnnnnnnnnnnnnnnnnnnnnnnnnnnnnnnnnnnnnnnnnnnnnnnnnnnnnnnnnnnnnnnnnnnnnnnnnnnnnnnnnnnnnnnnnnnnnnnnnnnnnnnnnnnnnnnnnnnnnnnnnnnnnnnnnnnnnnnnnnnnnnnnnnnnnnnnnnnnnnnnnnnnnnnnnnnnnnnnnnnnnnnnnnnnnnnnnnnnnnnnnnnnnnnnnnnnnnnnnnnnnnnnnnnnnnnnnnnnnnnnnnnnnnnnnnnnnnnnnnnnnnnnnnnnnnnnnnnnnnnnnnnnnnnnnnnnnnnnnnnnnnnnnnnnnnnnnnnnnnnnnnnnnnnnnnnnnnnnnnnnnnnnnnnnnnnnnnnnnnnnnnnnnnnnnnnnnnnnnnnnnnnnnnnnnnnnnnnnnnnnnnnnnnnnnnnnnnnnnnnnnnnnnnnnnnnnnnnnnnnnnnnnnnnnnnnnnnnnnnnnnnnnnnnnnnnnnnnnnnnnnnnnnnnnnnnnnnnnnnnnnnnnnnnnnnnnnnnnnnnnnnnnnnnnnnnnnnnnnnnnnnnnnnnnnnnnnnnnnnnnnnnnnnnnnnnnnnnnnnnnnnnnnnnnnnnnnnnnnnnnnnnnnnnnnnnnnnnnnnnnnnnnnnnnnnnnnnnnnnnnnnnnnnnnnnnnnnnnnnnnnnnnnnnnnnnnnnnnnnnnnnnnnnnnnnnnnnnnnnnnnnnnnnnnnnnnnnnnnnnnnnnnnnnnnnnnnnnnnnnnnnnnnnnnnnnnnnnnnnnnnnnnnnnnnnnnnnnnnnnnnnnnnnnnnnnnnnnnnnnnnnnnnnnnnnnnnnnnnnnnnnnnnnnnnnnnnnnnnnnnnnnnnnnnnnnnnnnnnnnnnnnnnnnnnnnnnnnnnnnnnnnnnnnnnnnnnnnnnnnnnnnnnnnnnnnnnnnnnnnnnnnnnnnnnnnnnnnnnnnnnnnnnnnnnnnnnnnnnnnnnnnnnnnnnnnnnnnnnnnnnnnnnnnnnnnnnnnnnnnnnnnnnnnnnnnnnnnnnnnnnnnnnnnnnnnnnnnnnnnnnnnnnnnnnnnnnnnnnnnnnnnnnnnnnnnnnnnnnnnnnnnnnnnnnnnnnnnnnnnnnnnnnnnnnnnnnnnnnnnnnnnnnnnnnnnnnnnnnnnnnnnnnnnnnnnnnnnnnnnnnnnnnnnnnnnnnnnnnnnnnnnnnnnnnnnnnnnnnnnnnnnnnnnnnnnnnnnnnnnnnnnnnnnnnnnnnnnnnnnnnnnnnnnnnnnnnnnnnnnnnnnnnnnnnnnnnnnnnnnnnnnnnnnnnnnnnnnnnnnnnnnnnnnnnnnnnnnnnnnnnnnnnnnnnnnnnnnnnnnnnnnnnnnnnnnnnnnnnnnnnnnnnnnnnnnnnnnnnnnnnnnnnnnnnnnnnnnnnnnnnnnnnnnnnnnnnnnnnnnnnnnnnnnnnnnnnnnnnnnnnnnnnnnnnnnnnnnnnnnnnnnnnnnnnnnnnnnnnnnnnnnnnnnnnnnnnnnnnnnnnnnnnnnnnnnnnnnnnnnnnnnnnnnnnnnnnnnnnnnnnnnnnnnnnnnnnnnnnnnnnnnnnnnnnnnnnnnnnnnnnnnnnnnnnnnnnnnnnnnnnnnnnnnnnnnnnnnnnnnnnnnnnnnnnnnnnnnnnnnnnnnnnnnnnnnnnnnnnnnnnnnnnnnnnnnnnnnnnnnnnnnnnnnnnnnnnnnnnnnnnnnnnnnnnnnnnnnnnnnnnnnnnnnnnnnnnnnnnnnnnnnnnnnnnnnnnnnnnnnnnnnnnnnnnnnnnnnnnnnnnnnnnnnnnnnnnnnnnnnnnnnnnnnnnnnnnnnnnnnnnnnnnnnnnnnnnnnnnnnnnnnnnnnnnnnnnnnnnnnnnnnnnnnnnnnnnnnnnnnnnnnnnnnnnnnnnnnnnnnnnnnnnnnnnnnnnnnnnnnnnnnnnnnnnnnnnnnnnnnnnnnnnnnnnnnnnnnnnnnnnnnnnnnnnnnnnnnnnnnnnnnnnnnnnnnnnnnnnnnnnnnnnnnnnnnnnnnnnnnnnnnnnnnnnnnnnnnnnnnnnnnnnnnnnnnnnnnnnnnnnnnnnnnnnnnnnnnnnnnnnnnnnnnnnnnnnnnnnnnnnnnnnnnnnnnnnnnnnnnnnnnnnnnnnnnnnnnnnnnnnnnnnnnnnnnnnnnnnnnnnnnnnnnnnnnnnnnnnnnnnnnnnnnnnnnnnnnnnnnnnnnnnnnnnnnnnnnnnnnnnnnnnnnnnnnnnnnnnnnnnnnnnnnnnnnnnnnnnnnnnnnnnnnnnnnnnnnnnnnnnnnnnnnnnnnnnnnnnnnnnnnnnnnnnnnnnnnnnnnnnnnnnnnnnnnnnnnnnnnnnnnnnnnnnnnnnnnnnnnnnnnnnnnnnnnnnnnnnnnnnnnnnnnnnnnnnnnnnnnnnnnnnnnnnnnnnnnnnnnnnnnnnnnnnnnnnnnnnnnnnnnnnnnnnnnnnnnnnnnnnnnnnnnnnnnnnnnnnnnnnnnnnnnnnnnnnnnnnnnnnnnnnnnnnnnnnnnnnnnnnnnnnnnnnnnnnnnnnnnnnnnnnnnnnnnnnnnnnnnnnnnnnnnnnnnnnnnnnnnnnnnnnnnnnnnnnnnnnnnnnnnnnnnnnnnnnnnnnnnnnnnnnnnnnnnnnnnnnnnnnnnnnnnnnnnnnnnnnnnnnnnnnnnnnnnnnnnnnnnnnnnnnnnnnnnnnnnnnnnnnnnnnnnnnnnnnnnnnnnnnnnnnnnnnnnnnnnnnnnnnnnnnnnnnnnnnnnnnnnnnnnnnnnnnnnnnnnnnnnnnnnnnnnnnnnnnnnnnnnnnnnnnnnnnnnnnnnnnnnnnnnnnnnnnnnnnnnnnnnnnnnnnnnnnnnnnnnnnnnnnnnnnnnnnnnnnnnnnnnnnnnnnnnnnnnnnnnnnnnnnnnnnnnnnnnnnnnnnnnnnnnnnnnnnnnnnnnnnnnnnnnnnnnnnnnnnnnnnnnnnnnnnnnnnnnnnnnnnnnnnnnnnnnnnnnnnnnnnnnnnnnnnnnnnnnnnnnnnnnnnnnnnnnnnnnnnnnnnnnnnnnnnnnnnnnnnnnnnnnnnnnnnnnnnnnnnnnnnnnnnnnnnnnnnnnnnnnnnnnnnnnnnnnnnnnnnnnnnnnnnnnnnnnnnnnnnnnnnnnnnnnnnnnnnnnnnnnnnnnnnnnnnnnnnnnnnnnnnnnnnnnnnnnnnnnnnnnnnnnnnnnnnnnnnnnnnnnnnnnnnnnnnnnnnnnnnnnnnnnnnnnnnnnnnnnnnnnnnnnnnnnnnnnnnnnnnnnnnnnnnnnnnnnnnnnnnnnnnnnnnnnnnnnnnnnnnnnnnnnnnnnnnnnnnnnnnnnnnnnnnnnnnnnnnnnnnnnnnnnnnnnnnnnnnnnnnnnnnnnnnnnnnnnnnnnnnnnnnnnnnnnnnnnnnnnnnnnnnnnnnnnnnnnnnnnnnnnnnnnnnnnnnnnnnnnnnnnnnnnnnnnnnnnnnnnnnnnnnnnnnnnnnnnnnnnnnnnnnnnnnnnnnnnnnnnnnnnnnnnnnnnnnnnnnnnnnnnnnnnnnnnnnnnnnnnnnnnnnnnnnnnnnnnnnnnnnnnnnnnnnnnnnnnnnnnnnnnnnnnnnnnnnnnnnnnnnnnnnnnnnnnnnnnnnnnnnnnnnnnnnnnnnnnnnnnnnnnnnnnnnnnnnnnnnnnnnnnnnnnnnnnnnnnnnnnnnnnnnnnnnnnnnnnnnnnnnnnnnnnnnnnnnnnnnnnnnnnnnnnnnnnnnnnnnnnnnnnnnnnnnnnnnnnnnnnnnnnnnnnnnnnnnnnnnnnnnnnnnnnnnnnnnnnnnnnnnnnnnnnnnnnnnnnnnnnnnnnnnnnnnnnnnnnnnnnnnnnnnnnnnnnnnnnnnnnnnnnnnnnnnnnnnnnnnnnnnnnnnnnnnnnnnnnnnnnnnnnnnnnnnnnnnnnnnnnnnnnnnnnnnnnnnnnnnnnnnnnnnnnnnnnnnnnnnnnnnnnnnnnnnnnnnnnnnnnnnnnnnnnnnnnnnnnnnnnnnnnnnnnnnnnnnnnnnnnnnnnnnnnnnnnnnnnnnnnnnnnnnnnnnnnnnnnnnnnnnnnnnnnnnnnnnnnnnnnnnnnnnnnnnnnnnnnnnnnnnnnnnnnnnnnnnnnnnnnnnnnnnnnnnnnnnnnnnnnnnnnnnnnnnnnnnnnnnnnnnnnnnnnnnnnnnnnnnnnnnnnnnnnnnnnnnnnnnnnnnnnnnnnnnnnnnnnnnnnnnnnnnnnnnnnnnnnnnnnnnnnnnnnnnnnnnnnnnnnnnnnnnnnnnnnnnnnnnnnnnnnnnnnnnnnnnnnnnnnnnnnnnnnnnnnnnnnnnnnnnnnnnnnnnnnnnnnnnnnnnnnnnnnnnnnnnnnnnnnnnnnnnnnnnnnnnnnnnnnnnnnnnnnnnnnnnnnnnnnnnnnnnnnnnnnnnnnnnnnnnnnnnnnnnnnnnnnnnnnnnnnnnnnnnnnnnnnnnnnnnnnnnnnnnnnnnnnnnnnnnnnnnnnnnnnnnnnnnnnnnnnnnnnnnnnnnnnnnnnnnnnnnnnnnnnnnnnnnnnnnnnnnnnnnnnnnnnnnnnnnnnnnnnnnnnnnnnnnnnnnnnnnnnnnnnnnnnnnnnnnnnnnnnnnnnnnnnnnnnnnnnnnnnnnnnnnnnnnnnnnnnnnnnnnnnnnnnnnnnnnnnnnnnnnnnnnnnnnnnnnnnnnnnnnnnnnnnnnnnnnnnnnnnnnnnnnnnnnnnnnnnnnnnnnnnnnnnnnnnnnnnnnnnnnnnnnnnnnnnnnnnnnnnnnnnnnnnnnnnnnnnnnnnnnnnnnnnnnnnnnnnnnnnnnnnnnnnnnnnnnnnnnnnnnnnnnnnnnnnnnnnnnnnnnnnnnnnnnnnnnnnnnnnnnnnnnnnnnnnnnnnnnnnnnnnnnnnnnnnnnnnnnnnnnnnnnnnnnnnnnnnnnnnnnnnnnnnnnnnnnnnnnnnnnnnnnnnnnnnnnnnnnnnnnnnnnnnnnnnnnnnnnnnnnnnnnnnnnnnnnnnnnnnnnnnnnnnnnnnnnnnnnnnnnnnnnnnnnnnnnnnnnnnnnnnnnnnnnnnnnnnnnnnnnnnnnnnnnnnnnnnnnnnnnnnnnnnnnnnnnnnnnnnnnnnnnnnnnnnnnnnnnnnnnnnnnnnnnnnnnnnnnnnnnnnnnnnnnnnnnnnnnnnnnnnnnnnnnnnnnnnnnnnnnnnnnnnnnnnnnnnnnnnnnnnnnnnnnnnnnnnnnnnnnnnnnnnnnnnnnnnnnnnnnnnnnnnnnnnnnnnnnnnnnnnnnnnnnnnnnnnnnnnnnnnnnnnnnnnnnnnnnnnnnnnnnnnnnnnnnnnnnnnnnnnnnnnnnnnnnnnnnnnnnnnnnnnnnnnnnnnnnnnnnnnnnnnnnnnnnnnnnnnnnnnnnnnnnnnnnnnnnnnnnnnnnnnnnnnnnnnnnnnnnnnnnnnnnnnnnnnnnnnnnnnnnnnnnnnnnnnnnnnnnnnnnnnnnnnnnnnnnnnnnnnnnnnnnnnnnnnnnnnnnnnnnnnnnnnnnnnnnnnnnnnnnnnnnnnnnnnnnnnnnnnnnnnnnnnnnnnnnnnnnnnnnnnnnnnnnnnnnnnnnnnnnnnnnnnnnnnnnnnnnnnnnnnnnnnnnnnnnnnnnnnnnnnnnnnnnnnnnnnnnnnnnnnnnnnnnnnnnnnnnnnnnnnnnnnnnnnnnnnnnnnnnnnnnnnnnnnnnnnnnnnnnnnnnnnnnnnnnnnnnnnnnnnnnnnnnnnnnnnnnnnnnnnnnnnnnnnnnnnnnnnnnnnnnnnnnnnnnnnnnnnnnnnnnnnnnnnnnnnnnnnnnnnnnnnnnnnnnnnnnnnnnnnnnnnnnnnnnnnnnnnnnnnnnnnnnnnnnnnnnnnnnnnnnnnnnnnnnnnnnnnnnnnnnnnnnnnnnnnnnnnnnnnnnnnnnnnnnnnnnnnnnnnnnnnnnnnnnnnnnnnnnnnnnnnnnnnnnnnnnnnnnnnnnnnnnnnnnnnnnnnnnnnnnnnnnnnnnnnnnnnnnnnnnnnnnnnnnnnnnnnnnnnnnnnnnnnnnnnnnnnnnnnnnnnnnnnnnnnnnnnnnnnnnnnnnnnnnnnnnnnnnnnnnnnnnnnnnnnnnnnnnnnnnnnnnnnnnnnnnnnnnnnnnnnnnnnnnnnnnnnnnnnnnnnnnnnnnnnnnnnnnnnnnnnnnnnnnnnnnnnnnnnnnnnnnnnnnnnnnnnnnnnnnnnnnnnnnnnnnnnnnnnnnnnnnnnnnnnnnnnnnnnnnnnnnnnnnnnnnnnnnnnnnnnnnnnnnnnnnnnnnnnnnnnnnnnnnnnnnnnnnnnnnnnnnnnnnnnnnnnnnnnnnnnnnnnnnnnnnnnnnnnnnnnnnnnnnnnnnnnnnnnnnnnnnnnnnnnnnnnnnnnnnnnnnnnnnnnnnnnnnnnnnnnnnnnnnnnnnnnnnnnnnnnnnnnnnnnnnnnnnnnnnnnnnnnnnnnnnnnnnnnnnnnnnnnnnnnnnnnnnnnnnnnnnnnnnnnnnnnnnnnnnnnnnnnnnnnnnnnnnnnnnnnnnnnnnnnnnnnnnnnnnnnnnnnnnnnnnnnnnnnnnnnnnnnnnnnnnnnnnnnnnnnnnnnnnnnnnnnnnnnnnnnnnnnnnnnnnnnnnnnnnnnnnnnnnnnnnnnnnnnnnnnnnnnnnnnnnnnnnnnnnnnnnnnnnnnnnnnnnnnnnnnnnnnnnnnnnnnnnnnnnnnnnnnnnnnnnnnnnnnnnnnnnnnnnnnnnnnnnnnnnnnnnnnnnnnnnnnnnnnnnnnnnnnnnnnnnnnnnnnnnnnnnnnnnnnnnnnnnnnnnnnnnnnnnnnnnnnnnnnnnnnnnnnnnnnnnnnnnnnnnnnnnnnnnnnnnnnnnnnnnnnnnnnnnnnnnnnnnnnnnnnnnnnnnnnnnnnnnnnnnnnnnnnnnnnnnnnnnnnnnnnnnnnnnnnnnnnnnnnnnnnnnnnnnnnnnnnnnnnnnnnnnnnnnnnnnnnnnnnnnnnnnnnnnnnnnnnnnnnnnnnnnnnnnnnnnnnnnnnnnnnnnnnnnnnnnnnnnnnnnnnnnnnnnnnnnnnnnnnnnnnnnnnnnnnnnnnnnnnnnnnnnnnnnnnnnnnnnnnnnnnnnnnnnnnnnnnnnnnnnnnnnnnnnnnnnnnnnnnnnnnnnnnnnnnnnnnnnnnnnnnnnnnnnnnnnnnnnnnnnnnnnnnnnnnnnnnnnnnnnnnnnnnnnnnnnnnnnnnnnnnnnnnnnnnnnnnnnnnnnnnnnnnnnnnnnnnnnnnnnnnnnnnnnnnnnnnnnnnnnnnnnnnnnnnnnnnnnnnnnnnnnnnnnnnnnnnnnnnnnnnnnnnnnnnnnnnnnnnnnnnnnnnnnnnnnnnnnnnnnnnnnnnnnnnnnnnnnnnnnnnnnnnnnnnnnnnnnnnnnnnnnnnnnnnnnnnnnnnnnnnnnnnnnnnnnnnnnnnnnnnnnnnnnnnnnnnnnnnnnnnnnnnnnnnnnnnnnnnnnnnnnnnnnnnnnnnnnnnnnnnnnnnnnnnnnnnnnnnnnnnnnnnnnnnnnnnnnnnnnnnnnnnnnnnnnnnnnnnnnnnnnnnnnnnnnnnnnnnnnnnnnnnnnnnnnnnnnnnnnnnnnnnnnnnnnnnnnnnnnnnnnnnnnnnnnnnnnnnnnnnnnnnnnnnnnnnnnnnnnnnnnnnnnnnnnnnnnnnnnnnnnnnnnnnnnnnnnnnnnnnnnnnnnnnnnnnnnnnnnnnnnnnnnnnnnnnnnnnnnnnnnnnnnnnnnnnnnnnnnnnnnnnnnnnnnnnnnnnnnnnnnnnnnnnnnnnnnnnnnnnnnnnnnnnnnnnnnnnnnnnnnnnnnnnnnnnnnnnnnnnnnnnnnnnnnnnnnnnnnnnnnnnnnnnnnnnnnnnnnnnnnnnnnnnnnnnnnnnnnnnnnnnnnnnnnnnnnnnnnnnnnnnnnnnnnnnnnnnnnnnnnnnnnnnnnnnnnnnnnnnnnnnnnnnnnnnnnnnnnnnnnnnnnnnnnnnnnnnnnnnnnnnnnnnnnnnnnnnnnnnnnnnnnnnnnnnnnnnnnnnnnnnnnnnnnnnnnnnnnnnnnnnnnnnnnnnnnnnnnnnnnnnnnnnnnnnnnnnnnnnnnnnnnnnnnnnnnnnnnnnnnnnnnnnnnnnnnnnnnnnnnnnnnnnnnnnnnnnnnnnnnnnnnnnnnnnnnnnnnnnnnnnnnnnnnnnnnnnnnnnnnnnnnnnnnnnnnnnnnnnnnnnnnnnnnnnnnnnnnnnnnnnnnnnnnnnnnnnnnnnnnnnnnnnnnnnnnnnnnnnnnnnnnnnnnnnnnnnnnnnnnnnnnnnnnnnnnnnnnnnnnnnnnnnnnnnnnnnnnnnnnnnnnnnnnnnnnnnnnnnnnnnnnnnnnnnnnnnnnnnnnnnnnnnnnnnnnnnnnnnnnnnnnnnnnnnnnnnnnnnnnnnnnnnnnnnnnnnnnnnnnnnnnnnnnnnnnnnnnnnnnnnnnnnnnnnnnnnnnnnnnnnnnnnnnnnnnnnnnnnnnnnnnnnnnnnnnnnnnnnnnnnnnnnnnnnnnnnnnnnnnnnnnnnnnnnnnnnnnnnnnnnnnnnnnnnnnnnnnnnnnnnnnnnnnnnnnnnnnnnnnnnnnnnnnnnnnnnnnnnnnnnnnnnnnnnnnnnnnnnnnnnnnnnnnnnnnnnnnnnnnnnnnnnnnnnnnnnnnnnnnnnnnnnnnnnnnnnnnnnnnnnnnnnnnnnnnnnnnnnnnnnnnnnnnnnnnnnnnnnnnnnnnnnnnnnnnnnnnnnnnnnnnnnnnnnnnnnnnnnnnnnnnnnnnnnnnnnnnnnnnnnnnnnnnnnnnnnnnnnnnnnnnnnnnnnnnnnnnnnnnnnnnnnnnnnnnnnnnnnnnnnnnnnnnnnnnnnnnnnnnnnnnnnnnnnnnnnnnnnnnnnnnnnnnnnnnnnnnnnnnnnnnnnnnnnnnnnnnnnnnnnnnnnnnnnnnnnnnnnnnnnnnnnnnnnnnnnnnnnnnnnnnnnnnnnnnnnnnnnnnnnnnnnnnnnnnnnnnnnnnnnnnnnnnnnnnnnnnnnnnnnnnnnnnnnnnnnnnnnnnnnnnnnnnnnnnnnnnnnnnnnnnnnnnnnnnnnnnnnnnnnnnnnnnnnnnnnnnnnnnnnnnnnnnnnnnnnnnnnnnnnnnnnnnnnnnnnnnnnnnnnnnnnnnnnnnnnnnnnnnnnnnnnnnnnnnnnnnnnnnnnnnnnnnnnnnnnnnnnnnnnnnnnnnnnnnnnnnnnnnnnnnnnnnnnnnnnnnnnnnnnnnnnnnnnnnnnnnnnnnnnnnnnnnnnnnnnnnnnnnnnnnnnnnnnnnnnnnnnnnnnnnnnnnnnnnnnnnnnnnnnnnnnnnnnnnnnnnnnnnnnnnnnnnnnnnnnnnnnnnnnnnnnnnnnnnnnnnnnnnnnnnnnnnnnnnnnnnnnnnnnnnnnnnnnnnnnnnnnnnnnnnnnnnnnnnnnnnnnnnnnnnnnnnnnnnnnnnnnnnnnnnnnnnnnnnnnnnnnnnnnnnnnnnnnnnnnnnnnnnnnnnnnnnnnnnnnnnnnnnnnnnnnnnnnnnnnnnnnnnnnnnnnnnnnnnnnnnnnnnnnnnnnnnnnnnnnnnnnnnnnnnnnnnnnnnnnnnnnnnnnnnnnnnnnnnnnnnnnnnnnnnnnnnnnnnnnnnnnnnnnnnnnnnnnnnnnnnnnnnnnnnnnnnnnnnnnnnnnnnnnnnnnnnnnnnnnnnnnnnnnnnnnnnnnnnnnnnnnnnnnnnnnnnnnnnnnnnnnnnnnnnnnnnnnnnnnnnnnnnnnnnnnnnnnnnnnnnnnnnnnnnnnnnnnnnnnnnnnnnnnnnnnnnnnnnnnnnnnnnnnnnnnnnnnnnnnnnnnnnnnnnnnnnnnnnnnnnnnnnnnnnnnnnnnnnnnnnnnnnnnnnnnnnnnnnnnnnnnnnnnnnnnnnnnnnnnnnnnnnnnnnnnnnnnnnnnnnnnnnnnnnnnnnnnnnnnnnnnnnnnnnnnnnnnnnnnnnnnnnnnnnnnnnnnnnnnnnnnnnnngaagacnnnnnngcgtcttc

SEQ ID NO: 15 - DNA, 300044 bp, Artificial Sequence
  source: /note="Description of Artificial Sequence: Synthetic polynucleotide"
  modified_base (11)..(15): a, c, t, or g
  modified_base (23)..(300022): a, c, t, or g
  misc_feature (23)..(300022): /note="This region may encompass 0-300000 nucleotides"
  modified_base (300030)..(300034): a, c, t, or g
  source: /note="See specification as filed for detailed description of substitutions and preferred embodiments"
gaagctcttcnnnnngaagagcnnnnnnnnnnnnnnnnnnnnnnnnnnnnnnnnnnnnnnnnnnnnnnnnnnnnnnnnnnnnnnnnnnnnnnnnnnnnnnnnnnnnnnnnnnnnnnnnnnnnnnnnnnnnnnnnnnnnnnnnnnnnnnnnnnnnnnnnnnnnnnnnnnnnnnnnnnnnnnnnnnnnnnnnnnnnnnnnnnnnnnnnnnnnnnnnnnnnnnnnnnnnnnnnnnnnnnnnnnnnnnnnnnnnnnnnnnnnnnnnnnnnnnnnnnnnnnnnnnnnnnnnnnnnnnnnnnnnnnnnnnnnnnnnnnnnnnnnnnnnnnnnnnnnnnnnnnnnnnnnnnnnnnnnnnnnnnnnnnnnnnnnnnnnnnnnnnnnnnnnnnnnnnnnnnnnnnnnnnnnnnnnnnnnnnnnnnnnnnnnnnnnnnnnnnnnnnnnnnnnnnnnnnnnnnnnnnnnnnnnnnnnnnnnnnnnnnnnnnnnnnnnnnnnnnnnnnnnnnnnnnnnnnnnnnnnnnnnnnnnnnnnnnnnnnnnnnnnnnnnnnnnnnnnnnnnnnnnnnnnnnnnnnnnnnnnnnnnnnnnnnnnnnnnnnnnnnnnnnnnnnnnnnnnnnnnnnnnnnnnnnnnnnnnnnnnnnnnnnnnnnnnnnnnnnnnnnnnnnnnnnnnnnnnnnnnnnnnnnnnnnnnnnnnnnnnnnnnnnnnnnnnnnnnnnnnnnnnnnnnnnnnnnnnnnnnnnnnnnnnnnnnnnnnnnnnnnnnnnnnnnnnnnnnnnnnnnnnnnnnnnnnnnnnnnnnnnnnnnnnnnnnnnnnnnnnnnnnnnnnnnnnnnnnnnnnnnnnnnnnnnnnnnnnnnnnnnnnnnnnnnnnnnnnnnnnnnnnnnnnnnnnnnnnnnnnnnnnnnnnnnnnnnnnnnnnnnnnnnnnnnnnnnnnnnnnnnnnnnnnnnnnnnnnnnnnnnnnnnnnnnnnnnnnnnnnnnnnnnnnnnnnnnnnnnnnnnnnnnnnnnnnnnnnnnnnnnnnnnnnnnnnnnnnnnnnnnnnnnnnnnnnnnnnnnnnnnnnnnnnnnnnnnnnnnnnnnnnnnnnnnnnnnnnnnnnnnnnnnnnnnnnnnnnnnnnnnnnnnnnnnnnnnnnnnnnnnnnnnnnnnnnnnnnnnnnnnnnnnnnnnnnnnnnnnnnnnnnnnnnnnnnnnnnnnnnnnnnnnnnnnnnnnnnnnnnnnnnnnnnnnnnnnnnnnnnnnnnnnnnnnnnnnnnnnnnnnnnnnnnnnnnnnnnnnnnnnnnnnnnnnnnnnnnnnnnnnnnnnnnnnnnnnnnnnnnnnnnnnnnnnnnnnnnnnnnnnnnnnnnnnnnnnnnnnnnnnnnnnnnnnnnnnnnnnnnnnnnnnnnnnnnnnnnnnnnnnnnnnnnnnnnnnnnnnnnnnnnnnnnnnnnnnnnnnnnnnnnnnnnnnnnnnnnnnnnnnnnnnnnnnnnnnnnnnnnnnnnnnnnnnnnnnnnnnnnnnnnnnnnnnnnnnnnnnnnnnnnnnnnnnnnnnnnnnnnnnnnnnnnnnnnnnnnnnnnnnnnnnnnnnnnnnnnnnnnnnnnnnnnnnnnnnnnnnnnnnnnnnnnnnnnnnnnnnnnnnnnnnnnnnnnnnnnnnnnnnnnnnnnnnnnnnnnnnnnnnnnnnnnnnnnnnnnnnnnnnnnnnnnnnnnnnnnnnnnnnnnnnnnnnnnnnnnnnnnnnnnnnnnnnnnnnnnnnnnnnnnnnnnnnnnnnnnnnnnnnnnnnnnnnnnnnnnnnnnnnnnnnnnnnnnnnnnnnnnnnnnnnnnnnnnnnnnnnnnnnnnnnnnnnnnnnnnnnnnnnnnnnnnnnnnnnnnnnnnnnnnnnnnnnnnnnnnnnnnnnnnnnnnnnnnnnnnnnnnnnnnnnnnnnnnnnnnnnnnnnnnnnnnnnnnnnnnnnnnnnnnnnnnnnnnnnnnnnnnnnnnnnnnnnnnnnnnnnnnnnnnnnnnnnnnnnnnnnnnnnnnnnnnnnnnnnnnnnnnnnnnnnnnnnnnnnnnnnnnnnnnnnnnnnnnnnnnnnnnnnnnnnnnnnnnnnnnnnnnnnnnnnnnnnnnnnnnnnnnnnnnnnnnnnnnnnnnnnnnnnnnnnnnnnnnnnnnnnnnnnnnnnnnnnnnnnnnnnnnnnnnnnnnnnnnnnnnnnnnnnnnnnnnnnnnnnnnnnnnnnnnnnnnnnnnnnnnnnnnnnnnnnnnnnnnnnnnnnnnnnnnnnnnnnnnnnnnnnnnnnnnnnnnnnnnnnnnnnnnnnnnnnnnnnnnnnnnnnnnnnnnnnnnnnnnnnnnnnnnnnnnnnnnnnnnnnnnnnnnnnnnnnnnnnnnnnnnnnnnnnnnnnnnnnnnnnnnnnnnnnnnnnnnnnnnnnnnnnnnnnnnnnnnnnnnnnnnnnnnnnnnnnnnnnnnnnnnnnnnnnnnnnnnnnnnnnnnnnnnnnnnnnnnnnnnnnnnnnnnnnnnnnnnnnnnnnnnnnnnnnnnnnnnnnnnnnnnnnnnnnnnnnnnnnnnnnnnnnnnnnnnnnnnnnnnnnnnnnnnnnnnnnnnnnnnnnnnnnnnnnnnnnnnnnnnnnnnnnnnnnnnnnnnnnnnnnnnnnnnnnnnnnnnnnnnnnnnnnnnnnnnnnnnnnnnnnnnnnnnnnnnnnnnnnnnnnnnnnnnnnnnnnnnnnnnnnnnnnnnnnnnnnnnnnnnnnnnnnnnnnnnnnnnnnnnnnnnnnnnnnnnnnnnnnnnnnnnnnnnnnnnnnnnnnnnnnnnnnnnnnnnnnnnnnnnnnnnnnnnnnnnnnnnnnnnnnnnnnnnnnnnnnnnnnnnnnnnnnnnnnnnnnnnnnnnnnnnnnnnnnnnnnnnnnnnnnnnnnnnnnnnnnnnnnnnnnnnnnnnnnnnnnnnnnnnnnnnnnnnnnnnnnnnnnnnnnnnnnnnnnnnnnnnnnnnnnnnnnnnnnnnnnnnnnnnnnnnnnnnnnnnnnnnnnnnnnnnnnnnnnnnnnnnnnnnnnnnnnnnnnnnnnnnnnnnnnnnnnnnnnnnnnnnnnnnnnnnnnnnnnnnnnnnnnnnnnnnnnnnnnnnnnnnnnnnnnnnnnnnnnnnnnnnnnnnnnnnnnnnnnnnnnnnnnnnnnnnnnnnnnnnnnnnnnnnnnnnnnnnnnnnnnnnnnnnnnnnnnnnnnnnnnnnnnnnnnnnnnnnnnnnnnnnnnnnnnnnnnnnnnnnnnnnnnnnnnnnnnnnnnnnnnnnnnnnnnnnnnnnnnnnnnnnnnnnnnnnnnnnnnnnnnnnnnnnnnnnnnnnnnnnnnnnnnnnnnnnnnnnnnnnnnnnnnnnnnnnnnnnnnnnnnnnnnnnnnnnnnnnnnnnnnnnnnnnnnnnnnnnnnnnnnnnnnnnnnnnnnnnnnnnnnnnnnnnnnnnnnnnnnnnnnnnnnnnnnnnnnnnnnnnnnnnnnnnnnnnnnnnnnnnnnnnnnnnnnnnnnnnnnnnnnnnnnnnnnnnnnnnnnnnnnnnnnnnnnnnnnnnnnnnnnnnnnnnnnnnnnnnnnnnnnnnnnnnnnnnnnnnnnnnnnnnnnnnnnnnnnnnnnnnnnnnnnnnnnnnnnnnnnnnnnnnnnnnnnnnnnnnnnnnnnnnnnnnnnnnnnnnnnnnnnnnnnnnnnnnnnnnnnnnnnnnnnnnnnnnnnnnnnnnnnnnnnnnnnnnnnnnnnnnnnnnnnnnnnnnnnnnnnnnnnnnnnnnnnnnnnnnnnnnnnnnnnnnnnnnnnnnnnnnnnnnnnnnnnnnnnnnnnnnnnnnnnnnnnnnnnnnnnnnnnnnnnnnnnnnnnnnnnnnnnnnnnnnnnnnnnnnnnnnnnnnnnnnnnnnnnnnnnnnnnnnnnnnnnnnnnnnnnnnnnnnnnnnnnnnnnnnnnnnnnnnnnnnnnnnnnnnnnnnnnnnnnnnnnnnnnnnnnnnnnnnnnnnnnnnnnnnnnnnnnnnnnnnnnnnnnnnnnnnnnnnnnnnnnnnnnnnnnnnnnnnnnnnnnnnnnnnnnnnnnnnnnnnnnnnnnnnnnnnnnnnnnnnnnnnnnnnnnnnnnnnnnnnnnnnnnnnnnnnnnnnnnnnnnnnnnnnnnnnnnnnnnnnnnnnnnnnnnnnnnnnnnnnnnnnnnnnnnnnnnnnnnnnnnnnnnnnnnnnnnnnnnnnnnnnnnnnnnnnnnnnnnnnnnnnnnnnnnnnnnnnnnnnnnnnnnnnnnnnnnnnnnnnnnnnnnnnnnnnnnnnnnnnnnnnnnnnnnnnnnnnnnnnnnnnnnnnnnnnnnnnnnnnnnnnnnnnnnnnnnnnnnnnnnnnnnnnnnnnnnnnnnnnnnnnnnnnnnnnnnnnnnnnnnnnnnnnnnnnnnnnnnnnnnnnnnnnnnnnnnnnnnnnnnnnnnnnnnnnnnnnnnnnnnnnnnnnnnnnnnnnnnnnnnnnnnnnnnnnnnnnnnnnnnnnnnnnnnnnnnnnnnnnnnnnnnnnnnnnnnnnnnnnnnnnnnnnnnnnnnnnnnnnnnnnnnnnnnnnnnnnnnnnnnnnnnnnnnnnnnnnnnnnnnnnnnnnnnnnnnnnnnnnnnnnnnnnnnnnnnnnnnnnnnnnnnnnnnnnnnnnnnnnnnnnnnnnnnnnnnnnnnnnnnnnnnnnnnnnnnnnnnnnnnnnnnnnnnnnnnnnnnnnnnnnnnnnnnnnnnnnnnnnnnnnnnnnnnnnnnnnnnnnnnnnnnnnnnnnnnnnnnnnnnnnnnnnnnnnnnnnnnnnnnnnnnnnnnnnnnnnnnnnnnnnnnnnnnnnnnnnnnnnnnnnnnnnnnnnnnnnnnnnnnnnnnnnnnnnnnnnnnnnnnnnnnnnnnnnnnnnnnnnnnnnnnnnnnnnnnnnnnnnnnnnnnnnnnnnnnnnnnnnnnnnnnnnnnnnnnnnnnnnnnnnnnnnnnnnnnnnnnnnnnnnnnnnnnnnnnnnnnnnnnnnnnnnnnnnnnnnnnnnnnnnnnnnnnnnnnnnnnnnnnnnnnnnnnnnnnnnnnnnnnnnnnnnnnnnnnnnnnnnnnnnnnnnnnnnnnnnnnnnnnnnnnnnnnnnnnnnnnnnnnnnnnnnnnnnnnnnnnnnnnnnnnnnnnnnnnnnnnnnnnnnnnnnnnnnnnnnnnnnnnnnnnnnnnnnnnnnnnnnnnnnnnnnnnnnnnnnnnnnnnnnnnnnnnnnnnnnnnnnnnnnnnnnnnnnnnnnnnnnnnnnnnnnnnnnnnnnnnnnnnnnnnnnnnnnnnnnnnnnnnnnnnnnnnnnnnnnnnnnnnnnnnnnnnnnnnnnnnnnnnnnnnnnnnnnnnnnnnnnnnnnnnnnnnnnnnnnnnnnnnnnnnnnnnnnnnnnnnnnnnnnnnnnnnnnnnnnnnnnnnnnnnnnnnnnnnnnnnnnnnnnnnnnnnnnnnnnnnnnnnnnnnnnnnnnnnnnnnnnnnnnnnnnnnnnnnnnnnnnnnnnnnnnnnnnnnnnnnnnnnnnnnnnnnnnnnnnnnnnnnnnnnnnnnnnnnnnnnnnnnnnnnnnnnnnnnnnnnnnnnnnnnnnnnnnnnnnnnnnnnnnnnnnnnnnnnnnnnnnnnnnnnnnnnnnnnnnnnnnnnnnnnnnnnnnnnnnnnnnnnnnnnnnnnnnnnnnnnnnnnnnnnnnnnnnnnnnnnnnnnnnnnnnnnnnnnnnnnnnnnnnnnnnnnnnnnnnnnnnnnnnnnnnnnnnnnnnnnnnnnnnnnnnnnnnnnnnnnnnnnnnnnnnnnnnnnnnnnnnnnnnnnnnnnnnnnnnnnnnnnnnnnnnnnnnnnnnnnnnnnnnnnnnnnnnnnnnnnnnnnnnnnnnnnnnnnnnnnnnnnnnnnnnnnnnnnnnnnnnnnnnnnnnnnnnnnnnnnnnnnnnnnnnnnnnnnnnnnnnnnnnnnnnnnnnnnnnnnnnnnnnnnnnnnnnnnnnnnnnnnnnnnnnnnnnnnnnnnnnnnnnnnnnnnnnnnnnnnnnnnnnnnnnnnnnnnnnnnnnnnnnnnnnnnnnnnnnnnnnnnnnnnnnnnnnnnnnnnnnnnnnnnnnnnnnnnnnnnnnnnnnnnnnnnnnnnnnnnnnnnnnnnnnnnnnnnnnnnnnnnnnnnnnnnnnnnnnnnnnnnnnnnnnnnnnnnnnnnnnnnnnnnnnnnnnnnnnnnnnnnnnnnnnnnnnnnnnnnnnnnnnnnnnnnnnnnnnnnnnnnnnnnnnnnnnnnnnnnnnnnnnnnnnnnnnnnnnnnnnnnnnnnnnnnnnnnnnnnnnnnnnnnnnnnnnnnnnnnnnnnnnnnnnnnnnnnnnnnnnnnnnnnnnnnnnnnnnnnnnnnnnnnnnnnnnnnnnnnnnnnnnnnnnnnnnnnnnnnnnnnnnnnnnnnnnnnnnnnnnnnnnnnnnnnnnnnnnnnnnnnnnnnnnnnnnnnnnnnnnnnnnnnnnnnnnnnnnnnnnnnnnnnnnnnnnnnnnnnnnnnnnnnnnnnnnnnnnnnnnnnnnnnnnnnnnnnnnnnnnnnnnnnnnnnnnnnnnnnnnnnnnnnnnnnnnnnnnnnnnnnnnnnnnnnnnnnnnnnnnnnnnnnnnnnnnnnnnnnnnnnnnnnnnnnnnnnnnnnnnnnnnnnnnnnnnnnnnnnnnnnnnnnnnnnnnnnnnnnnnnnnnnnnnnnnnnnnnnnnnnnnnnnnnnnnnnnnnnnnnnnnnnnnnnnnnnnnnnnnnnnnnnnnnnnnnnnnnnnnnnnnnnnnnnnnnnnnnnnnnnnnnnnnnnnnnnnnnnnnnnnnnnnnnnnnnnnnnnnnnnnnnnnnnnnnnnnnnnnnnnnnnnnnnnnnnnnnnnnnnnnnnnnnnnnnnnnnnnnnnnnnnnnnnnnnnnnnnnnnnnnnnnnnnnnnnnnnnnnnnnnnnnnnnnnnnnnnnnnnnnnnnnnnnnnnnnnnnnnnnnnnnnnnnnnnnnnnnnnnnnnnnnnnnnnnnnnnnnnnnnnnnnnnnnnnnnnnnnnnnnnnnnnnnnnnnnnnnnnnnnnnnnnnnnnnnnnnnnnnnnnnnnnnnnnnnnnnnnnnnnnnnnnnnnnnnnnnnnnnnnnnnnnnnnnnnnnnnnnnnnnnnnnnnnnnnnnnnnnnnnnnnnnnnnnnnnnnnnnnnnnnnnnnnnnnnnnnnnnnnnnnnnnnnnnnnnnnnnnnnnnnnnnnnnnnnnnnnnnnnnnnnnnnnnnnnnnnnnnnnnnnnnnnnnnnnnnnnnnnnnnnnnnnnnnnnnnnnnnnnnnnnnnnnnnnnnnnnnnnnnnnnnnnnnnnnnnnnnnnnnnnnnnnnnnnnnnnnnnnnnnnnnnnnnnnnnnnnnnnnnnnnnnnnnnnnnnnnnnnnnnnnnnnnnnnnnnnnnnnnnnnnnnnnnnnnnnnnnnnnnnnnnnnnnnnnnnnnnnnnnnnnnnnnnnnnnnnnnnnnnnnnnnnnnnnnnnnnnnnnnnnnnnnnnnnnnnnnnnnnnnnnnnnnnnnnnnnnnnnnnnnnnnnnnnnnnnnnnnnnnnnnnnnnnnnnnnnnnnnnnnnnnnnnnnnnnnnnnnnnnnnnnnnnnnnnnnnnnnnnnnnnnnnnnnnnnnnnnnnnnnnnnnnnnnnnnnnnnnnnnnnnnnnnnnnnnnnnnnnnnnnnnnnnnnnnnnnnnnnnnnnnnnnnnnnnnnnnnnnnnnnnnnnnnnnnnnnnnnnnnnnnnnnnnnnnnnnnnnnnnnnnnnnnnnnnnnnnnnnnnnnnnnnnnnnnnnnnnnnnnnnnnnnnnnnnnnnnnnnnnnnnnnnnnnnnnnnnnnnnnnnnnnnnnnnnnnnnnnnnnnnnnnnnnnnnnnnnnnnnnnnnnnnnnnnnnnnnnnnnnnnnnnnnnnnnnnnnnnnnnnnnnnnnnnnnnnnnnnnnnnnnnnnnnnnnnnnnnnnnnnnnnnnnnnnnnnnnnnnnnnnnnnnnnnnnnnnnnnnnnnnnnnnnnnnnnnnnnnnnnnnnnnnnnnnnnnnnnnnnnnnnnnnnnnnnnnnnnnnnnnnnnnnnnnnnnnnnnnnnnnnnnnnnnnnnnnnnnnnnnnnnnnnnnnnnnnnnnnnnnnnnnnnnnnnnnnnnnnnnnnnnnnnnnnnnnnnnnnnnnnnnnnnnnnnnnnnnnnnnnnnnnnnnnnnnnnnnnnnnnnnnnnnnnnnnnnnnnnnnnnnnnnnnnnnnnnnnnnnnnnnnnnnnnnnnnnnnnnnnnnnnnnnnnnnnnnnnnnnnnnnnnnnnnnnnnnnnnnnnnnnnnnnnnnnnnnnnnnnnnnnnnnnnnnnnnnnnnnnnnnnnnnnnnnnnnnnnnnnnnnnnnnnnnnnnnnnnnnnnnnnnnnnnnnnnnnnnnnnnnnnnnnnnnnnnnnnnnnnnnnnnnnnnnnnnnnnnnnnnnnnnnnnnnnnnnnnnnnnnnnnnnnnnnnnnnnnnnnnnnnnnnnnnnnnnnnnnnnnnnnnnnnnnnnnnnnnnnnnnnnnnnnnnnnnnnnnnnnnnnnnnnnnnnnnnnnnnnnnnnnnnnnnnnnnnnnnnnnnnnnnnnnnnnnnnnnnnnnnnnnnnnnnnnnnnnnnnnnnnnnnnnnnnnnnnnnnnnnnnnnnnnnnnnnnnnnnnnnnnnnnnnnnnnnnnnnnnnnnnnnnnnnnnnnnnnnnnnnnnnnnnnnnnnnnnnnnnnnnnnnnnnnnnnnnnnnnnnnnnnnnnnnnnnnnnnnnnnnnnnnnnnnnnnnnnnnnnnnnnnnnnnnnnnnnnnnnnnnnnnnnnnnnnnnnnnnnnnnnnnnnnnnnnnnnnnnnnnnnnnnnnnnnnnnnnnnnnnnnnnnnnnnnnnnnnnnnnnnnnnnnnnnnnnnnnnnnnnnnnnnnnnnnnnnnnnnnnnnnnnnnnnnnnnnnnnnnnnnnnnnnnnnnnnnnnnnnnnnnnnnnnnnnnnnnnnnnnnnnnnnnnnnnnnnnnnnnnnnnnnnnnnnnnnnnnnnnnnnnnnnnnnnnnnnnnnnnnnnnnnnnnnnnnnnnnnnnnnnnnnnnnnnnnnnnnnnnnnnnnnnnnnnnnnnnnnnnnnnnnnnnnnnnnnnnnnnnnnnnnnnnnnnnnnnnnnnnnnnnnnnnnnnnnnnnnnnnnnnnnnnnnnnnnnnnnnnnnnnnnnnnnnnnnnnnnnnnnnnnnnnnnnnnnnnnnnnnnnnnnnnnnnnnnnnnnnnnnnnnnnnnnnnnnnnnnnnnnnnnnnnnnnnnnnnnnnnnnnnnnnnnnnnnnnnnnnnnnnnnnnnnnnnnnnnnnnnnnnnnnnnnnnnnnnnnnnnnnnnnnnnnnnnnnnnnnnnnnnnnnnnnnnnnnnnnnnnnnnnnnnnnnnnnnnnnnnnnnnnnnnnnnnnnnnnnnnnnnnnnnnnnnnnnnnnnnnnnnnnnnnnnnnnnnnnnnnnnnnnnnnnnnnnnnnnnnnnnnnnnnnnnnnnnnnnnnnnnnnnnnnnnnnnnnnnnnnnnnnnnnnnnnnnnnnnnnnnnnnnnnnnnnnnnnnnnnnnnnnnnnnnnnnnnnnnnnnnnnnnnnnnnnnnnnnnnnnnnnnnnnnnnnnnnnnnnnnnnnnnnnnnnnnnnnnnnnnnnnnnnnnnnnnnnnnnnnnnnnnnnnnnnnnnnnnnnnnnnnnnnnnnnnnnnnnnnnnnnnnnnnnnnnnnnnnnnnnnnnnnnnnnnnnnnnnnnnnnnnnnnnnnnnnnnnnnnnnnnnnnnnnnnnnnnnnnnnnnnnnnnnnnnnnnnnnnnnnnnnnnnnnnnnnnnnnnnnnnnnnnnnnnnnnnnnnnnnnnnnnnnnnnnnnnnnnnnnnnnnnnnnnnnnnnnnnnnnnnnnnnnnnnnnnnnnnnnnnnnnnnnnnnnnnnnnnnnnnnnnnnnnnnnnnnnnnnnnnnnnnnnnnnnnnnnnnnnnnnnnnnnnnnnnnnnnnnnnnnnnnnnnnnnnnnnnnnnnnnnnnnnnnnnnnnnnnnnnnnnnnnnnnnnnnnnnnnnnnnnnnnnnnnnnnnnnnnnnnnnnnnnnnnnnnnnnnnnnnnnnnnnnnnnnnnnnnnnnnnnnnnnnnnnnnnnnnnnnnnnnnnnnnnnnnnnnnnnnnnnnnnnnnnnnnnnnnnnnnnnnnnnnnnnnnnnnnnnnnnnnnnnnnnnnnnnnnnnnnnnnnnnnnnnnnnnnnnnnnnnnnnnnnnnnnnnnnnnnnnnnnnnnnnnnnnnnnnnnnnnnnnnnnnnnnnnnnnnnnnnnnnnnnnnnnnnnnnnnnnnnnnnnnnnnnnnnnnnnnnnnnnnnnnnnnnnnnnnnnnnnnnnnnnnnnnnnnnnnnnnnnnnnnnnnnnnnnnnnnnnnnnnnnnnnnnnnnnnnnnnnnnnnnnnnnnnnnnnnnnnnnnnnnnnnnnnnnnnnnnnnnnnnnnnnnnnnnnnnnnnnnnnnnnnnnnnnnnnnnnnnnnnnnnnnnnnnnnnnnnnnnnnnnnnnnnnnnnnnnnnnnnnnnnnnnnnnnnnnnnnnnnnnnnnnnnnnnnnnnnnnnnnnnnnnnnnnnnnnnnnnnnnnnnnnnnnnnnnnnnnnnnnnnnnnnnnnnnnnnnnnnnnnnnnnnnnnnnnnnnnnnnnnnnnnnnnnnnnnnnnnnnnnnnnnnnnnnnnnnnnnnnnnnnnnnnnnnnnnnnnnnnnnnnnnnnnnnnnnnnnnnnnnnnnnnnnnnnnnnnnnnnnnnnnnnnnnnnnnnnnnnnnnnnnnnnnnnnnnnnnnnnnnnnnnnnnnnnnnnnnnnnnnnnnnnnnnnnnnnnnnnnnnnnnnnnnnnnnnnnnnnnnnnnnnnnnnnnnnnnnnnnnnnnnnnnnnnnnnnnnnnnnnnnnnnnnnnnnnnnnnnnnnnnnnnnnnnnnnnnnnnnnnnnnnnnnnnnnnnnnnnnnnnnnnnnnnnnnnnnnnnnnnnnnnnnnnnnnnnnnnnnnnnnnnnnnnnnnnnnnnnnnnnnnnnnnnnnnnnnnnnnnnnnnnnnnnnnnnnnnnnnnnnnnnnnnnnnnnnnnnnnnnnnnnnnnnnnnnnnnnnnnnnnnnnnnnnnnnnnnnnnnnnnnnnnnnnnnnnnnnnnnnnnnnnnnnnnnnnnnnnnnnnnnnnnnnnnnnnnnnnnnnnnnnnnnnnnnnnnnnnnnnnnnnnnnnnnnnnnnnnnnnnnnnnnnnnnnnnnnnnnnnnnnnnnnnnnnnnnnnnnnnnnnnnnnnnnnnnnnnnnnnnnnnnnnnnnnnnnnnnnnnnnnnnnnnnnnnnnnnnnnnnnnnnnnnnnnnnnnnnnnnnnnnnnnnnnnnnnnnnnnnnnnnnnnnnnnnnnnnnnnnnnnnnnnnnnnnnnnnnnnnnnnnnnnnnnnnnnnnnnnnnnnnnnnnnnnnnnnnnnnnnnnnnnnnnnnnnnnnnnnnnnnnnnnnnnnnnnnnnnnnnnnnnnnnnnnnnnnnnnnnnnnnnnnnnnnnnnnnnnnnnnnnnnnnnnnnnnnnnnnnnnnnnnnnnnnnnnnnnnnnnnnnnnnnnnnnnnnnnnnnnnnnnnnnnnnnnnnnnnnnnnnnnnnnnnnnnnnnnnnnnnnnnnnnnnnnnnnnnnnnnnnnnnnnnnnnnnnnnnnnnnnnnnnnnnnnnnnnnnnnnnnnnnnnnnnnnnnnnnnnnnnnnnnnnnnnnnnnnnnnnnnnnnnnnnnnnnnnnnnnnnnnnnnnnnnnnnnnnnnnnnnnnnnnnnnnnnnnnnnnnnnnnnnnnnnnnnnnnnnnnnnnnnnnnnnnnnnnnnnnnnnnnnnnnnnnnnnnnnnnnnnnnnnnnnnnnnnnnnnnnnnnnnnnnnnnnnnnnnnnnnnnnnnnnnnnnnnnnnnnnnnnnnnnnnnnnnnnnnnnnnnnnnnnnnnnnnnnnnnnnnnnnnnnnnnnnnnnnnnnnnnnnnnnnnnnnnnnnnnnnnnnnnnnnnnnnnnnnnnnnnnnnnnnnnnnnnnnnnnnnnnnnnnnnnnnnnnnnnnnnnnnnnnnnnnnnnnnnnnnnnnnnnnnnnnnnnnnnnnnnnnnnnnnnnnnnnnnnnnnnnnnnnnnnnnnnnnnnnnnnnnnnnnnnnnnnnnnnnnnnnnnnnnnnnnnnnnnnnnnnnnnnnnnnnnnnnnnnnnnnnnnnnnnnnnnnnnnnnnnnnnnnnnnnnnnnnnnnnnnnnnnnnnnnnnnnnnnnnnnnnnnnnnnnnnnnnnnnnnnnnnnnnnnnnnnnnnnnnnnnnnnnnnnnnnnnnnnnnnnnnnnnnnnnnnnnnnnnnnnnnnnnnnnnnnnnnnnnnnnnnnnnnnnnnnnnnnnnnnnnnnnnnnnnnnnnnnnnnnnnnnnnnnnnnnnnnnnnnnnnnnnnnnnnnnnnnnnnnnnnnnnnnnnnnnnnnnnnnnnnnnnnnnnnnnnnnnnnnnnnnnnnnnnnnnnnnnnnnnnnnnnnnnnnnnnnnnnnnnnnnnnnnnnnnnnnnnnnnnnnnnnnnnnnnnnnnnnnnnnnnnnnnnnnnnnnnnnnnnnnnnnnnnnnnnnnnnnnnnnnnnnnnnnnnnnnnnnnnnnnnnnnnnnnnnnnnnnnnnnnnnnnnnnnnnnnnnnnnnnnnnnnnnnnnnnnnnnnnnnnnnnnnnnnnnnnnnnnnnnnnnnnnnnnnnnnnnnnnnnnnnnnnnnnnnnnnnnnnnnnnnnnnnnnnnnnnnnnnnnnnnnnnnnnnnnnnnnnnnnnnnnnnnnnnnnnnnnnnnnnnnnnnnnnnnnnnnnnnnnnnnnnnnnnnnnnnnnnnnnnnnnnnnnnnnnnnnnnnnnnnnnnnnnnnnnnnnnnnnnnnnnnnnnnnnnnnnnnnnnnnnnnnnnnnnnnnnnnnnnnnnnnnnnnnnnnnnnnnnnnnnnnnnnnnnnnnnnnnnnnnnnnnnnnnnnnnnnnnnnnnnnnnnnnnnnnnnnnnnnnnnnnnnnnnnnnnnnnnnnnnnnnnnnnnnnnnnnnnnnnnnnnnnnnnnnnnnnnnnnnnnnnnnnnnnnnnnnnnnnnnnnnnnnnnnnnnnnnnnnnnnnnnnnnnnnnnnnnnnnnnnnnnnnnnnnnnnnnnnnnnnnnnnnnnnnnnnnnnnnnnnnnnnnnnnnnnnnnnnnnnnnnnnnnnnnnnnnnnnnnnnnnnnnnnnnnnnnnnnnnnnnnnnnnnnnnnnnnnnnnnnnnnnnnnnnnnnnnnnnnnnnnnnnnnnnnnnnnnnnnnnnnnnnnnnnnnnnnnnnnnnnnnnnnnnnnnnnnnnnnnnnnnnnnnnnnnnnnnnnnnnnnnnnnnnnnnnnnnnnnnnnnnnnnnnnnnnnnnnnnnnnnnnnnnnnnnnnnnnnnnnnnnnnnnnnnnnnnnnnnnnnnnnnnnnnnnnnnnnnnnnnnnnnnnnnnnnnnnnnnnnnnnnnnnnnnnnnnnnnnnnnnnnnnnnnnnnnnnnnnnnnnnnnnnnnnnnnnnnnnnnnnnnnnnnnnnnnnnnnnnnnnnnnnnnnnnnnnnnnnnnnnnnnnnnnnnnnnnnnnnnnnnnnnnnnnnnnnnnnnnnnnnnnnnnnnnnnnnnnnnnnnnnnnnnnnnnnnnnnnnnnnnnnnnnnnnnnnnnnnnnnnnnnnnnnnnnnnnnnnnnnnnnnnnnnnnnnnnnnnnnnnnnnnnnnnnnnnnnnnnnnnnnnnnnnnnnnnnnnnnnnnnnnnnnnnnnnnnnnnnnnnnnnnnnnnnnnnnnnnnnnnnnnnnnnnnnnnnnnnnnnnnnnnnnnnnnnnnnnnnnnnnnnnnnnnnnnnnnnnnnnnnnnnnnnnnnnnnnnnnnnnnnnnnnnnnnnnnnnnnnnnnnnnnnnnnnnnnnnnnnnnnnnnnnnnnnnnnnnnnnnnnnnnnnnnnnnnnnnnnnnnnnnnnnnnnnnnnnnnnnnnnnnnnnnnnnnnnnnnnnnnnnnnnnnnnnnnnnnnnnnnnnnnnnnnnnnnnnnnnnnnnnnnnnnnnnnnnnnnnnnnnnnnnnnnnnnnnnnnnnnnnnnnnnnnnnnnnnnnnnnnnnnnnnnnnnnnnnnnnnnnnnnnnnnnnnnnnnnnnnnnnnnnnnnnnnnnnnnnnnnnnnnnnnnnnnnnnnnnnnnnnnnnnnnnnnnnnnnnnnnnnnnnnnnnnnnnnnnnnnnnnnnnnnnnnnnnnnnnnnnnnnnnnnnnnnnnnnnnnnnnnnnnnnnnnnnnnnnnnnnnnnnnnnnnnnnnnnnnnnnnnnnnnnnnnnnnnnnnnnnnnnnnnnnnnnnnnnnnnnnnnnnnnnnnnnnnnnnnnnnnnnnnnnnnnnnnnnnnnnnnnnnnnnnnnnnnnnnnnnnnnnnnnnnnnnnnnnnnnnnnnnnnnnnnnnnnnnnnnnnnnnnnnnnnnnnnnnnnnnnnnnnnnnnnnnnnnnnnnnnnnnnnnnnnnnnnnnnnnnnnnnnnnnnnnnnnnnnnnnnnnnnnnnnnnnnnnnnnnnnnnnnnnnnnnnnnnnnnnnnnnnnnnnnnnnnnnnnnnnnnnnnnnnnnnnnnnnnnnnnnnnnnnnnnnnnnnnnnnnnnnnnnnnnnnnnnnnnnnnnnnnnnnnnnnnnnnnnnnnnnnnnnnnnnnnnnnnnnnnnnnnnnnnnnnnnnnnnnnnnnnnnnnnnnnnnnnnnnnnnnnnnnnnnnnnnnnnnnnnnnnnnnnnnnnnnnnnnnnnnnnnnnnnnnnnnnnnnnnnnnnnnnnnnnnnnnnnnnnnnnnnnnnnnnnnnnnnnnnnnnnnnnnnnnnnnnnnnnnnnnnnnnnnnnnnnnnnnnnnnnnnnnnnnnnnnnnnnnnnnnnnnnnnnnnnnnnnnnnnnnnnnnnnnnnnnnnnnnnnnnnnnnnnnnnnnnnnnnnnnnnnnnnnnnnnnnnnnnnnnnnnnnnnnnnnnnnnnnnnnnnnnnnnnnnnnnnnnnnnnnnnnnnnnnnnnnnnnnnnnnnnnnnnnnnnnnnnnnnnnnnnnnnnnnnnnnnnnnnnnnnnnnnnnnnnnnnnnnnnnnnnnnnnnnnnnnnnnnnnnnnnnnnnnnnnnnnnnnnnnnnnnnnnnnnnnnnnnnnnnnnnnnnnnnnnnnnnnnnnnnnnnnnnnnnnnnnnnnnnnnnnnnnnnnnnnnnnnnnnnnnnnnnnnnnnnnnnnnnnnnnnnnnnnnnnnnnnnnnnnnnnnnnnnnnnnnnnnnnnnnnnnnnnnnnnnnnnnnnnnnnnnnnnnnnnnnnnnnnnnnnnnnnnnnnnnnnnnnnnnnnnnnnnnnnnnnnnnnnnnnnnnnnnnnnnnnnnnnnnnnnnnnnnnnnnnnnnnnnnnnnnnnnnnnnnnnnnnnnnnnnnnnnnnnnnnnnnnnnnnnnnnnnnnnnnnnnnnnnnnnnnnnnnnnnnnnnnnnnnnnnnnnnnnnnnnnnnnnnnnnnnnnnnnnnnnnnnnnnnnnnnnnnnnnnnnnnnnnnnnnnnnnnnnnnnnnnnnnnnnnnnnnnnnnnnnnnnnnnnnnnnnnnnnnnnnnnnnnnnnnnnnnnnnnnnnnnnnnnnnnnnnnnnnnnnnnnnnnnnnnnnnnnnnnnnnnnnnnnnnnnnnnnnnnnnnnnnnnnnnnnnnnnnnnnnnnnnnnnnnnnnnnnnnnnnnnnnnnnnnnnnnnnnnnnnnnnnnnnnnnnnnnnnnnnnnnnnnnnnnnnnnnnnnnnnnnnnnnnnnnnnnnnnnnnnnnnnnnnnnnnnnnnnnnnnnnnnnnnnnnnnnnnnnnnnnnnnnnnnnnnnnnnnnnnnnnnnnnnnnnnnnnnnnnnnnnnnnnnnnnnnnnnnnnnnnnnnnnnnnnnnnnnnnnnnnnnnnnnnnnnnnnnnnnnnnnnnnnnnnnnnnnnnnnnnnnnnnnnnnnnnnnnnnnnnnnnnnnnnnnnnnnnnnnnnnnnnnnnnnnnnnnnnnnnnnnnnnnnnnnnnnnnnnnnnnnnnnnnnnnnnnnnnnnnnnnnnnnnnnnnnnnnnnnnnnnnnnnnnnnnnnnnnnnnnnnnnnnnnnnnnnnnnnnnnnnnnnnnnnnnnnnnnnnnnnnnnnnnnnnnnnnnnnnnnnnnnnnnnnnnnnnnnnnnnnnnnnnnnnnnnnnnnnnnnnnnnnnnnnnnnnnnnnnnnnnnnnnnnnnnnnnnnnnnnnnnnnnnnnnnnnnnnnnnnnnnnnnnnnnnnnnnnnnnnnnnnnnnnnnnnnnnnnnnnnnnnnnnnnnnnnnnnnnnnnnnnnnnnnnnnnnnnnnnnnnnnnnnnnnnnnnnnnnnnnnnnnnnnnnnnnnnnnnnnnnnnnnnnnnnnnnnnnnnnnnnnnnnnnnnnnnnnnnnnnnnnnnnnnnnnnnnnnnnnnnnnnnnnnnnnnnnnnnnnnnnnnnnnnnnnnnnnnnnnnnnnnnnnnnnnnnnnnnnnnnnnnnnnnnnnnnnnnnnnnnnnnnnnnnnnnnnnnnnnnnnnnnnnnnnnnnnnnnnnnnnnnnnnnnnnnnnnnnnnnnnnnnnnnnnnnnnnnnnnnnnnnnnnnnnnnnnnnnnnnnnnnnnnnnnnnnnnnnnnnnnnnnnnnnnnnnnnnnnnnnnnnnnnnnnnnnnnnnnnnnnnnnnnnnnnnnnnnnnnnnnnnnnnnnnnnnnnnnnnnnnnnnnnnnnnnnnnnnnnnnnnnnnnnnnnnnnnnnnnnnnnnnnnnnnnnnnnnnnnnnnnnnnnnnnnnnnnnnnnnnnnnnnnnnnnnnnnnnnnnnnnnnnnnnnnnnnnnnnnnnnnnnnnnnnnnnnnnnnnnnnnnnnnnnnnnnnnnnnnnnnnnnnnnnnnnnnnnnnnnnnnnnnnnnnnnnnnnnnnnnnnnnnnnnnnnnnnnnnnnnnnnnnnnnnnnnnnnnnnnnnnnnnnnnnnnnnnnnnnnnnnnnnnnnnnnnnnnnnnnnnnnnnnnnnnnnnnnnnnnnnnnnnnnnnnnnnnnnnnnnnnnnnnnnnnnnnnnnnnnnnnnnnnnnnnnnnnnnnnnnnnnnnnnnnnnnnnnnnnnnnnnnnnnnnnnnnnnnnnnnnnnnnnnnnnnnnnnnnnnnnnnnnnnnnnnnnnnnnnnnnnnnnnnnnnnnnnnnnnnnnnnnnnnnnnnnnnnnnnnnnnnnnnnnnnnnnnnnnnnnnnnnnnnnnnnnnnnnnnnnnnnnnnnnnnnnnnnnnnnnnnnnnnnnnnnnnnnnnnnnnnnnnnnnnnnnnnnnnnnnnnnnnnnnnnnnnnnnnnnnnnnnnnnnnnnnnnnnnnnnnnnnnnnnnnnnnnnnnnnnnnnnnnnnnnnnnnnnnnnnnnnnnnnnnnnnnnnnnnnnnnnnnnnnnnnnnnnnnnnnnnnnnnnnnnnnnnnnnnnnnnnnnnnnnnnnnnnnnnnnnnnnnnnnnnnnnnnnnnnnnnnnnnnnnnnnnnnnnnnnnnnnnnnnnnnnnnnnnnnnnnnnnnnnnnnnnnnnnnnnnnnnnnnnnnnnnnnnnnnnnnnnnnnnnnnnnnnnnnnnnnnnnnnnnnnnnnnnnnnnnnnnnnnnnnnnnnnnnnnnnnnnnnnnnnnnnnnnnnnnnnnnnnnnnnnnnnnnnnnnnnnnnnnnnnnnnnnnnnnnnnnnnnnnnnnnnnnnnnnnnnnnnnnnnnnnnnnnnnnnnnnnnnnnnnnnnnnnnnnnnnnnnnnnnnnnnnnnnnnnnnnnnnnnnnnnnnnnnnnnnnnnnnnnnnnnnnnnnnnnnnnnnnnnnnnnnnnnnnnnnnnnnnnnnnnnnnnnnnnnnnnnnnnnnnnnnnnnnnnnnnnnnnnnnnnnnnnnnnnnnnnnnnnnnnnnnnnnnnnnnnnnnnnnnnnnnnnnnnnnnnnnnnnnnnnnnnnnnnnnnnnnnnnnnnnnnnnnnnnnnnnnnnnnnnnnnnnnnnnnnnnnnnnnnnnnnnnnnnnnnnnnnnnnnnnnnnnnnnnnnnnnnnnnnnnnnnnnnnnnnnnnnnnnnnnnnnnnnnnnnnnnnnnnnnnnnnnnnnnnnnnnnnnnnnnnnnnnnnnnnnnnnnnnnnnnnnnnnnnnnnnnnnnnnnnnnnnnnnnnnnnnnnnnnnnnnnnnnnnnnnnnnnnnnnnnnnnnnnnnnnnnnnnnnnnnnnnnnnnnnnnnnnnnnnnnnnnnnnnnnnnnnnnnnnnnnnnnnnnnnnnnnnnnnnnnnnnnnnnnnnnnnnnnnnnnnnnnnnnnnnnnnnnnnnnnnnnnnnnnnnnnnnnnnnnnnnnnnnnnnnnnnnnnnnnnnnnnnnnnnnnnnnnnnnnnnnnnnnnnnnnnnnnnnnnnnnnnnnnnnnnnnnnnnnnnnnnnnnnnnnnnnnnnnnnnnnnnnnnnnnnnnnnnnnnnnnnnnnnnnnnnnnnnnnnnnnnnnnnnnnnnnnnnnnnnnnnnnnnnnnnnnnnnnnnnnnnnnnnnnnnnnnnnnnnnnnnnnnnnnnnnnnnnnnnnnnnnnnnnnnnnnnnnnnnnnnnnnnnnnnnnnnnnnnnnnnnnnnnnnnnnnnnnnnnnnnnnnnnnnnnnnnnnnnnnnnnnnnnnnnnnnnnnnnnnnnnnnnnnnnnnnnnnnnnnnnnnnnnnnnnnnnnnnnnnnnnnnnnnnnnnnnnnnnnnnnnnnnnnnnnnnnnnnnnnnnnnnnnnnnnnnnnnnnnnnnnnnnnnnnnnnnnnnnnnnnnnnnnnnnnnnnnnnnnnnnnnnnnnnnnnnnnnnnnnnnnnnnnnnnnnnnnnnnnnnnnnnnnnnnnnnnnnnnnnnnnnnnnnnnnnnnnnnnnnnnnnnnnnnnnnnnnnnnnnnnnnnnnnnnnnnnnnnnnnnnnnnnnnnnnnnnnnnnnnnnnnnnnnnnnnnnnnnnnnnnnnnnnnnnnnnnnnnnnnnnnnnnnnnnnnnnnnnnnnnnnnnnnnnnnnnnnnnnnnnnnnnnnnnnnnnnnnnnnnnnnnnnnnnnnnnnnnnnnnnnnnnnnnnnnnnnnnnnnnnnnnnnnnnnnnnnnnnnnnnnnnnnnnnnnnnnnnnnnnnnnnnnnnnnnnnnnnnnnnnnnnnnnnnnnnnnnnnnnnnnnnnnnnnnnnnnnnnnnnnnnnnnnnnnnnnnnnnnnnnnnnnnnnnnnnnnnnnnnnnnnnnnnnnnnnnnnnnnnnnnnnnnnnnnnnnnnnnnnnnnnnnnnnnnnnnnnnnnnnnnnnnnnnnnnnnnnnnnnnnnnnnnnnnnnnnnnnnnnnnnnnnnnnnnnnnnnnnnnnnnnnnnnnnnnnnnnnnnnnnnnnnnnnnnnnnnnnnnnnnnnnnnnnnnnnnnnnnnnnnnnnnnnnnnnnnnnnnnnnnnnnnnnnnnnnnnnnnnnnnnnnnnnnnnnnnnnnnnnnnnnnnnnnnnnnnnnnnnnnnnnnnnnnnnnnnnnnnnnnnnnnnnnnnnnnnnnnnnnnnnnnnnnnnnnnnnnnnnnnnnnnnnnnnnnnnnnnnnnnnnnnnnnnnnnnnnnnnnnnnnnnnnnnnnnnnnnnnnnnnnnnnnnnnnnnnnnnnnnnnnnnnnnnnnnnnnnnnnnnnnnnnnnnnnnnnnnnnnnnnnnnnnnnnnnnnnnnnnnnnnnnnnnnnnnnnnnnnnnnnnnnnnnnnnnnnnnnnnnnnnnnnnnnnnnnnnnnnnnnnnnnnnnnnnnnnnnnnnnnnnnnnnnnnnnnnnnnnnnnnnnnnnnnnnnnnnnnnnnnnnnnnnnnnnnnnnnnnnnnnnnnnnnnnnnnnnnnnnnnnnnnnnnnnnnnnnnnnnnnnnnnnnnnnnnnnnnnnnnnnnnnnnnnnnnnnnnnnnnnnnnnnnnnnnnnnnnnnnnnnnnnnnnnnnnnnnnnnnnnnnnnnnnnnnnnnnnnnnnnnnnnnnnnnnnnnnnnnnnnnnnnnnnnnnnnnnnnnnnnnnnnnnnnnnnnnnnnnnnnnnnnnnnnnnnnnnnnnnnnnnnnnnnnnnnnnnnnnnnnnnnnnnnnnnnnnnnnnnnnnnnnnnnnnnnnnnnnnnnnnnnnnnnnnnnnnnnnnnnnnnnnnnnnnnnnnnnnnnnnnnnnnnnnnnnnnnnnnnnnnnnnnnnnnnnnnnnnnnnnnnnnnnnnnnnnnnnnnnnnnnnnnnnnnnnnnnnnnnnnnnnnnnnnnnnnnnnnnnnnnnnnnnnnnnnnnnnnnnnnnnnnnnnnnnnnnnnnnnnnnnnnnnnnnnnnnnnnnnnnnnnnnnnnnnnnnnnnnnnnnnnnnnnnnnnnnnnnnnnnnnnnnnnnnnnnnnnnnnnnnnnnnnnnnnnnnnnnnnnnnnnnnnnnnnnnnnnnnnnnnnnnnnnnnnnnnnnnnnnnnnnnnnnnnnnnnnnnnnnnnnnnnnnnnnnnnnnnnnnnnnnnnnnnnnnnnnnnnnnnnnnnnnnnnnnnnnnnnnnnnnnnnnnnnnnnnnnnnnnnnnnnnnnnnnnnnnnnnnnnnnnnnnnnnnnnnnnnnnnnnnnnnnnnnnnnnnnnnnnnnnnnnnnnnnnnnnnnnnnnnnnnnnnnnnnnnnnnnnnnnnnnnnnnnnnnnnnnnnnnnnnnnnnnnnnnnnnnnnnnnnnnnnnnnnnnnnnnnnnnnnnnnnnnnnnnnnnnnnnnnnnnnnnnnnnnnnnnnnnnnnnnnnnnnnnnnnnnnnnnnnnnnnnnnnnnnnnnnnnnnnnnnnnnnnnnnnnnnnnnnnnnnnnnnnnnnnnnnnnnnnnnnnnnnnnnnnnnnnnnnnnnnnnnnnnnnnnnnnnnnnnnnnnnnnnnnnnnnnnnnnnnnnnnnnnnnnnnnnnnnnnnnnnnnnnnnnnnnnnnnnnnnnnnnnnnnnnnnnnnnnnnnnnnnnnnnnnnnnnnnnnnnnnnnnnnnnnnnnnnnnnnnnnnnnnnnnnnnnnnnnnnnnnnnnnnnnnnnnnnnnnnnnnnnnnnnnnnnnnnnnnnnnnnnnnnnnnnnnnnnnnnnnnnnnnnnnnnnnnnnnnnnnnnnnnnnnnnnnnnnnnnnnnnnnnnnnnnnnnnnnnnnnnnnnnnnnnnnnnnnnnnnnnnnnnnnnnnnnnnnnnnnnnnnnnnnnnnnnnnnnnnnnnnnnnnnnnnnnnnnnnnnnnnnnnnnnnnnnnnnnnnnnnnnnnnnnnnnnnnnnnnnnnnnnnnnnnnnnnnnnnnnnnnnnnnnnnnnnnnnnnnnnnnnnnnnnnnnnnnnnnnnnnnnnnnnnnnnnnnnnnnnnnnnnnnnnnnnnnnnnnnnnnnnnnnnnnnnnnnnnnnnnnnnnnnnnnnnnnnnnnnnnnnnnnnnnnnnnnnnnnnnnnnnnnnnnnnnnnnnnnnnnnnnnnnnnnnnnnnnnnnnnnnnnnnnnnnnnnnnnnnnnnnnnnnnnnnnnnnnnnnnnnnnnnnnnnnnnnnnnnnnnnnnnnnnnnnnnnnnnnnnnnnnnnnnnnnnnnnnnnnnnnnnnnnnnnnnnnnnnnnnnnnnnnnnnnnnnnnnnnnnnnnnnnnnnnnnnnnnnnnnnnnnnnnnnnnnnnnnnnnnnnnnnnnnnnnnnnnnnnnnnnnnnnnnnnnnnnnnnnnnnnnnnnnnnnnnnnnnnnnnnnnnnnnnnnnnnnnnnnnnnnnnnnnnnnnnnnnnnnnnnnnnnnnnnnnnnnnnnnnnnnnnnnnnnnnnnnnnnnnnnnnnnnnnnnnnnnnnnnnnnnnnnnnnnnnnnnnnnnnnnnnnnnnnnnnnnnnnnnnnnnnnnnnnnnnnnnnnnnnnnnnnnnnnnnnnnnnnnnnnnnnnnnnnnnnnnnnnnnnnnnnnnnnnnnnnnnnnnnnnnnnnnnnnnnnnnnnnnnnnnnnnnnnnnnnnnnnnnnnnnnnnnnnnnnnnnnnnnnnnnnnnnnnnnnnnnnnnnnnnnnnnnnnnnnnnnnnnnnnnnnnnnnnnnnnnnnnnnnnnnnnnnnnnnnnnnnnnnnnnnnnnnnnnnnnnnnnnnnnnnnnnnnnnnnnnnnnnnnnnnnnnnnnnnnnnnnnnnnnnnnnnnnnnnnnnnnnnnnnnnnnnnnnnnnnnnnnnnnnnnnnnnnnnnnnnnnnnnnnnnnnnnnnnnnnnnnnnnnnnnnnnnnnnnnnnnnnnnnnnnnnnnnnnnnnnnnnnnnnnnnnnnnnnnnnnnnnnnnnnnnnnnnnnnnnnnnnnnnnnnnnnnnnnnnnnnnnnnnnnnnnnnnnnnnnnnnnnnnnnnnnnnnnnnnnnnnnnnnnnnnnnnnnnnnnnnnnnnnnnnnnnnnnnnnnnnnnnnnnnnnnnnnnnnnnnnnnnnnnnnnnnnnnnnnnnnnnnnnnnnnnnnnnnnnnnnnnnnnnnnnnnnnnnnnnnnnnnnnnnnnnnnnnnnnnnnnnnnnnnnnnnnnnnnnnnnnnnnnnnnnnnnnnnnnnnnnnnnnnnnnnnnnnnnnnnnnnnnnnnnnnnnnnnnnnnnnnnnnnnnnnnnnnnnnnnnnnnnnnnnnnnnnnnnnnnnnnnnnnnnnnnnnnnnnnnnnnnnnnnnnnnnnnnnnnnnnnnnnnnnnnnnnnnnnnnnnnnnnnnnnnnnnnnnnnnnnnnnnnnnnnnnnnnnnnnnnnnnnnnnnnnnnnnnnnnnnnnnnnnnnnnnnnnnnnnnnnnnnnnnnnnnnnnnnnnnnnnnnnnnnnnnnnnnnnnnnnnnnnnnnnnnnnnnnnnnnnnnnnnnnnnnnnnnnnnnnnnnnnnnnnnnnnnnnnnnnnnnnnnnnnnnnnnnnnnnnnnnnnnnnnnnnnnnnnnnnnnnnnnnnnnnnnnnnnnnnnnnnnnnnnnnnnnnnnnnnnnnnnnnnnnnnnnnnnnnnnnnnnnnnnnnnnnnnnnnnnnnnnnnnnnnnnnnnnnnnnnnnnnnnnnnnnnnnnnnnnnnnnnnnnnnnnnnnnnnnnnnnnnnnnnnnnnnnnnnnnnnnnnnnnnnnnnnnnnnnnnnnnnnnnnnnnnnnnnnnnnnnnnnnnnnnnnnnnnnnnnnnnnnnnnnnnnnnnnnnnnnnnnnnnnnnnnnnnnnnnnnnnnnnnnnnnnnnnnnnnnnnnnnnnnnnnnnnnnnnnnnnnnnnnnnnnnnnnnnnnnnnnnnnnnnnnnnnnnnnnnnnnnnnnnnnnnnnnnnnnnnnnnnnnnnnnnnnnnnnnnnnnnnnnnnnnnnnnnnnnnnnnnnnnnnnnnnnnnnnnnnnnnnnnnnnnnnnnnnnnnnnnnnnnnnnnnnnnnnnnnnnnnnnnnnnnnnnnnnnnnnnnnnnnnnnnnnnnnnnnnnnnnnnnnnnnnnnnnnnnnnnnnnnnnnnnnnnnnnnnnnnnnnnnnnnnnnnnnnnnnnnnnnnnnnnnnnnnnnnnnnnnnnnnnnnnnnnnnnnnnnnnnnnnnnnnnnnnnnnnnnnnnnnnnnnnnnnnnnnnnnnnnnnnnnnnnnnnnnnnnnnnnnnnnnnnnnnnnnnnnnnnnnnnnnnnnnnnnnnnnnnnnnnnnnnnnnnnnnnnnnnnnnnnnnnnnnnnnnnnnnnnnnnnnnnnnnnnnnnnnnnnnnnnnnnnnnnnnnnnnnnnnnnnnnnnnnnnnnnnnnnnnnnnnnnnnnnnnnnnnnnnnnnnnnnnnnnnnnnnnnnnnnnnnnnnnnnnnnnnnnnnnnnnnnnnnnnnnnnnnnnnnnnnnnnnnnnnnnnnnnnnnnnnnnnnnnnnnnnnnnnnnnnnnnnnnnnnnnnnnnnnnnnnnnnnnnnnnnnnnnnnnnnnnnnnnnnnnnnnnnnnnnnnnnnnnnnnnnnnnnnnnnnnnnnnnnnnnnnnnnnnnnnnnnnnnnnnnnnnnnnnnnnnnnnnnnnnnnnnnnnnnnnnnnnnnnnnnnnnnnnnnnnnnnnnnnnnnnnnnnnnnnnnnnnnnnnnnnnnnnnnnnnnnnnnnnnnnnnnnnnnnnnnnnnnnnnnnnnnnnnnnnnnnnnnnnnnnnnnnnnnnnnnnnnnnnnnnnnnnnnnnnnnnnnnnnnnnnnnnnnnnnnnnnnnnnnnnnnnnnnnnnnnnnnnnnnnnnnnnnnnnnnnnnnnnnnnnnnnnnnnnnnnnnnnnnnnnnnnnnnnnnnnnnnnnnnnnnnnnnnnnnnnnnnnnnnnnnnnnnnnnnnnnnnnnnnnnnnnnnnnnnnnnnnnnnnnnnnnnnnnnnnnnnnnnnnnnnnnnnnnnnnnnnnnnnnnnnnnnnnnnnnnnnnnnnnnnnnnnnnnnnnnnnnnnnnnnnnnnnnnnnnnnnnnnnnnnnnnnnnnnnnnnnnnnnnnnnnnnnnnnnnnnnnnnnnnnnnnnnnnnnnnnnnnnnnnnnnnnnnnnnnnnnnnnnnnnnnnnnnnnnnnnnnnnnnnnnnnnnnnnnnnnnnnnnnnnnnnnnnnnnnnnnnnnnnnnnnnnnnnnnnnnnnnnnnnnnnnnnnnnnnnnnnnnnnnnnnnnnnnnnnnnnnnnnnnnnnnnnnnnnnnnnnnnnnnnnnnnnnnnnnnnnnnnnnnnnnnnnnnnnnnnnnnnnnnnnnnnnnnnnnnnnnnnnnnnnnnnnnnnnnnnnnnnnnnnnnnnnnnnnnnnnnnnnnnnnnnnnnnnnnnnnnnnnnnnnnnnnnnnnnnnnnnnnnnnnnnnnnnnnnnnnnnnnnnnnnnnnnnnnnnnnnnnnnnnnnnnnnnnnnnnnnnnnnnnnnnnnnnnnnnnnnnnnnnnnnnnnnnnnnnnnnnnnnnnnnnnnnnnnnnnnnnnnnnnnnnnnnnnnnnnnnnnnnnnnnnnnnnnnnnnnnnnnnnnnnnnnnnnnnnnnnnnnnnnnnnnnnnnnnnnnnnnnnnnnnnnnnnnnnnnnnnnnnnnnnnnnnnnnnnnnnnnnnnnnnnnnnnnnnnnnnnnnnnnnnnnnnnnnnnnnnnnnnnnnnnnnnnnnnnnnnnnnnnnnnnnnnnnnnnnnnnnnnnnnnnnnnnnnnnnnnnnnnnnnnnnnnnnnnnnnnnnnnnnnnnnnnnnnnnnnnnnnnnnnnnnnnnnnnnnnnnnnnnnnnnnnnnnnnnnnnnnnnnnnnnnnnnnnnnnnnnnnnnnnnnnnnnnnnnnnnnnnnnnnnnnnnnnnnnnnnnnnnnnnnnnnnnnnnnnnnnnnnnnnnnnnnnnnnnnnnnnnnnnnnnnnnnnnnnnnnnnnnnnnnnnnnnnnnnnnnnnnnnnnnnnnnnnnnnnnnnnnnnnnnnnnnnnnnnnnnnnnnnnnnnnnnnnnnnnnnnnnnnnnnnnnnnnnnnnnnnnnnnnnnnnnnnnnnnnnnnnnnnnnnnnnnnnnnnnnnnnnnnnnnnnnnnnnnnnnnnnnnnnnnnnnnnnnnnnnnnnnnnnnnnnnnnnnnnnnnnnnnnnnnnnnnnnnnnnnnnnnnnnnnnnnnnnnnnnnnnnnnnnnnnnnnnnnnnnnnnnnnnnnnnnnnnnnnnnnnnnnnnnnnnnnnnnnnnnnnnnnnnnnnnnnnnnnnnnnnnnnnnnnnnnnnnnnnnnnnnnnnnnnnnnnnnnnnnnnnnnnnnnnnnnnnnnnnnnnnnnnnnnnnnnnnnnnnnnnnnnnnnnnnnnnnnnnnnnnnnnnnnnnnnnnnnnnnnnnnnnnnnnnnnnnnnnnnnnnnnnnnnnnnnnnnnnnnnnnnnnnnnnnnnnnnnnnnnnnnnnnnnnnnnnnnnnnnnnnnnnnnnnnnnnnnnnnnnnnnnnnnnnnnnnnnnnnnnnnnnnnnnnnnnnnnnnnnnnnnnnnnnnnnnnnnnnnnnnnnnnnnnnnnnnnnnnnnnnnnnnnnnnnnnnnnnnnnnnnnnnnnnnnnnnnnnnnnnnnnnnnnnnnnnnnnnnnnnnnnnnnnnnnnnnnnnnnnnnnnnnnnnnnnnnnnnnnnnnnnnnnnnnnnnnnnnnnnnnnnnnnnnnnnnnnnnnnnnnnnnnnnnnnnnnnnnnnnnnnnnnnnnnnnnnnnnnnnnnnnnnnnnnnnnnnnnnnnnnnnnnnnnnnnnnnnnnnnnnnnnnnnnnnnnnnnnnnnnnnnnnnnnnnnnnnnnnnnnnnnnnnnnnnnnnnnnnnnnnnnnnnnnnnnnnnnnnnnnnnnnnnnnnnnnnnnnnnnnnnnnnnnnnnnnnnnnnnnnnnnnnnnnnnnnnnnnnnnnnnnnnnnnnnnnnnnnnnnnnnnnnnnnnnnnnnnnnnnnnnnnnnnnnnnnnnnnnnnnnnnnnnnnnnnnnnnnnnnnnnnnnnnnnnnnnnnnnnnnnnnnnnnnnnnnnnnnnnnnnnnnnnnnnnnnnnnnnnnnnnnnnnnnnnnnnnnnnnnnnnnnnnnnnnnnnnnnnnnnnnnnnnnnnnnnnnnnnnnnnnnnnnnnnnnnnnnnnnnnnnnnnnnnnnnnnnnnnnnnnnnnnnnnnnnnnnnnnnnnnnnnnnnnnnnnnnnnnnnnnnnnnnnnnnnnnnnnnnnnnnnnnnnnnnnnnnnnnnnnnnnnnnnnnnnnnnnnnnnnnnnnnnnnnnnnnnnnnnnnnnnnnnnnnnnnnnnnnnnnnnnnnnnnnnnnnnnnnnnnnnnnnnnnnnnnnnnnnnnnnnnnnnnnnnnnnnnnnnnnnnnnnnnnnnnnnnnnnnnnnnnnnnnnnnnnnnnnnnnnnnnnnnnnnnnnnnnnnnnnnnnnnnnnnnnnnnnnnnnnnnnnnnnnnnnnnnnnnnnnnnnnnnnnnnnnnnnnnnnnnnnnnnnnnnnnnnnnnnnnnnnnnnnnnnnnnnnnnnnnnnnnnnnnnnnnnnnnnnnnnnnnnnnnnnnnnnnnnnnnnnnnnnnnnnnnnnnnnnnnnnnnnnnnnnnnnnnnnnnnnnnnnnnnnnnnnnnnnnnnnnnnnnnnnnnnnnnnnnnnnnnnnnnnnnnnnnnnnnnnnnnnnnnnnnnnnnnnnnnnnnnnnnnnnnnnnnnnnnnnnnnnnnnnnnnnnnnnnnnnnnnnnnnnnnnnnnnnnnnnnnnnnnnnnnnnnnnnnnnnnnnnnnnnnnnnnnnnnnnnnnnnnnnnnnnnnnnnnnnnnnnnnnnnnnnnnnnnnnnnnnnnnnnnnnnnnnnnnnnnnnnnnnnnnnnnnnnnnnnnnnnnnnnnnnnnnnnnnnnnnnnnnnnnnnnnnnnnnnnnnnnnnnnnnnnnnnnnnnnnnnnnnnnnnnnnnnnnnnnnnnnnnnnnnnnnnnnnnnnnnnnnnnnnnnnnnnnnnnnnnnnnnnnnnnnnnnnnnnnnnnnnnnnnnnnnnnnnnnnnnnnnnnnnnnnnnnnnnnnnnnnnnnnnnnnnnnnnnnnnnnnnnnnnnnnnnnnnnnnnnnnnnnnnnnnnnnnnnnnnnnnnnnnnnnnnnnnnnnnnnnnnnnnnnnnnnnnnnnnnnnnnnnnnnnnnnnnnnnnnnnnnnnnnnnnnnnnnnnnnnnnnnnnnnnnnnnnnnnnnnnnnnnnnnnnnnnnnnnnnnnnnnnnnnnnnnnnnnnnnnnnnnnnnnnnnnnnnnnnnnnnnnnnnnnnnnnnnnnnnnnnnnnnnnnnnnnnnnnnnnnnnnnnnnnnnnnnnnnnnnnnnnnnnnnnnnnnnnnnnnnnnnnnnnnnnnnnnnnnnnnnnnnnnnnnnnnnnnnnnnnnnnnnnnnnnnnnnnnnnnnnnnnnnnnnnnnnnnnnnnnnnnnnnnnnnnnnnnnnnnnnnnnnnnnnnnnnnnnnnnnnnnnnnnnnnnnnnnnnnnnnnnnnnnnnnnnnnnnnnnnnnnnnnnnnnnnnnnnnnnnnnnnnnnnnnnnnnnnnnnnnnnnnnnnnnnnnnnnnnnnnnnnnnnnnnnnnnnnnnnnnnnnnnnnnnnnnnnnnnnnnnnnnnnnnnnnnnnnnnnnnnnnnnnnnnnnnnnnnnnnnnnnnnnnnnnnnnnnnnnnnnnnnnnnnnnnnnnnnnnnnnnnnnnnnnnnnnnnnnnnnnnnnnnnnnnnnnnnnnnnnnnnnnnnnnnnnnnnnnnnnnnnnnnnnnnnnnnnnnnnnnnnnnnnnnnnnnnnnnnnnnnnnnnnnnnnnnnnnnnnnnnnnnnnnnnnnnnnnnnnnnnnnnnnnnnnnnnnnnnnnnnnnnnnnnnnnnnnnnnnnnnnnnnnnnnnnnnnnnnnnnnnnnnnnnnnnnnnnnnnnnnnnnnnnnnnnnnnnnnnnnnnnnnnnnnnnnnnnnnnnnnnnnnnnnnnnnnnnnnnnnnnnnnnnnnnnnnnnnnnnnnnnnnnnnnnnnnnnnnnnnnnnnnnnnnnnnnnnnnnnnnnnnnnnnnnnnnnnnnnnnnnnnnnnnnnnnnnnnnnnnnnnnnnnnnnnnnnnnnnnnnnnnnnnnnnnnnnnnnnnnnnnnnnnnnnnnnnnnnnnnnnnnnnnnnnnnnnnnnnnnnnnnnnnnnnnnnnnnnnnnnnnnnnnnnnnnnnnnnnnnnnnnnnnnnnnnnnnnnnnnnnnnnnnnnnnnnnnnnnnnnnnnnnnnnnnnnnnnnnnnnnnnnnnnnnnnnnnnnnnnnnnnnnnnnnnnnnnnnnnnnnnnnnnnnnnnnnnnnnnnnnnnnnnnnnnnnnnnnnnnnnnnnnnnnnnnnnnnnnnnnnnnnnnnnnnnnnnnnnnnnnnnnnnnnnnnnnnnnnnnnnnnnnnnnnnnnnnnnnnnnnnnnnnnnnnnnnnnnnnnnnnnnnnnnnnnnnnnnnnnnnnnnnnnnnnnnnnnnnnnnnnnnnnnnnnnnnnnnnnnnnnnnnnnnnnnnnnnnnnnnnnnnnnnnnnnnnnnnnnnnnnnnnnnnnnnnnnnnnnnnnnnnnnnnnnnnnnnnnnnnnnnnnnnnnnnnnnnnnnnnnnnnnnnnnnnnnnnnnnnnnnnnnnnnnnnnnnnnnnnnnnnnnnnnnnnnnnnnnnnnnnnnnnnnnnnnnnnnnnnnnnnnnnnnnnnnnnnnnnnnnnnnnnnnnnnnnnnnnnnnnnnnnnnnnnnnnnnnnnnnnnnnnnnnnnnnnnnnnnnnnnnnnnnnnnnnnnnnnnnnnnnnnnnnnnnnnnnnnnnnnnnnnnnnnnnnnnnnnnnnnnnnnnnnnnnnnnnnnnnnnnnnnnnnnnnnnnnnnnnnnnnnnnnnnnnnnnnnnnnnnnnnnnnnnnnnnnnnnnnnnnnnnnnnnnnnnnnnnnnnnnnnnnnnnnnnnnnnnnnnnnnnnnnnnnnnnnnnnnnnnnnnnnnnnnnnnnnnnnnnnnnnnnnnnnnnnnnnnnnnnnnnnnnnnnnnnnnnnnnnnnnnnnnnnnnnnnnnnnnnnnnnnnnnnnnnnnnnnnnnnnnnnnnnnnnnnnnnnnnnnnnnnnnnnnnnnnnnnnnnnnnnnnnnnnnnnnnnnnnnnnnnnnnnnnnnnnnnnnnnnnnnnnnnnnnnnnnnnnnnnnnnnnnnnnnnnnnnnnnnnnnnnnnnnnnnnnnnnnnnnnnnnnnnnnnnnnnnnnnnnnnnnnnnnnnnnnnnnnnnnnnnnnnnnnnnnnnnnnnnnnnnnnnnnnnnnnnnnnnnnnnnnnnnnnnnnnnnnnnnnnnnnnnnnnnnnnnnnnnnnnnnnnnnnnnnnnnnnnnnnnnnnnnnnnnnnnnnnnnnnnnnnnnnnnnnnnnnnnnnnnnnnnnnnnnnnnnnnnnnnnnnnnnnnnnnnnnnnnnnnnnnnnnnnnnnnnnnnnnnnnnnnnnnnnnnnnnnnnnnnnnnnnnnnnnnnnnnnnnnnnnnnnnnnnnnnnnnnnnnnnnnnnnnnnnnnnnnnnnnnnnnnnnnnnnnnnnnnnnnnnnnnnnnnnnnnnnnnnnnnnnnnnnnnnnnnnnnnnnnnnnnnnnnnnnnnnnnnnnnnnnnnnnnnnnnnnnnnnnnnnnnnnnnnnnnnnnnnnnnnnnnnnnnnnnnnnnnnnnnnnnnnnnnnnnnnnnnnnnnnnnnnnnnnnnnnnnnnnnnnnnnnnnnnnnnnnnnnnnnnnnnnnnnnnnnnnnnnnnnnnnnnnnnnnnnnnnnnnnnnnnnnnnnnnnnnnnnnnnnnnnnnnnnnnnnnnnnnnnnnnnnnnnnnnnnnnnnnnnnnnnnnnnnnnnnnnnnnnnnnnnnnnnnnnnnnnnnnnnnnnnnnnnnnnnnnnnnnnnnnnnnnnnnnnnnnnnnnnnnnnnnnnnnnnnnnnnnnnnnnnnnnnnnnnnnnnnnnnnnnnnnnnnnnnnnnnnnnnnnnnnnnnnnnnnnnnnnnnnnnnnnnnnnnnnnnnnnnnnnnnnnnnnnnnnnnnnnnnnnnnnnnnnnnnnnnnnnnnnnnnnnnnnnnnnnnnnnnnnnnnnnnnnnnnnnnnnnnnnnnnnnnnnnnnnnnnnnnnnnnnnnnnnnnnnnnnnnnnnnnnnnnnnnnnnnnnnnnnnnnnnnnnnnnnnnnnnnnnnnnnnnnnnnnnnnnnnnnnnnnnnnnnnnnnnnnnnnnnnnnnnnnnnnnnnnnnnnnnnnnnnnnnnnnnnnnnnnnnnnnnnnnnnnnnnnnnnnnnnnnnnnnnnnnnnnnnnnnnnnnnnnnnnnnnnnnnnnnnnnnnnnnnnnnnnnnnnnnnnnnnnnnnnnnnnnnnnnnnnnnnnnnnnnnnnnnnnnnnnnnnnnnnnnnnnnnnnnnnnnnnnnnnnnnnnnnnnnnnnnnnnnnnnnnnnnnnnnnnnnnnnnnnnnnnnnnnnnnnnnnnnnnnnnnnnnnnnnnnnnnnnnnnnnnnnnnnnnnnnnnnnnnnnnnnnnnnnnnnnnnnnnnnnnnnnnnnnnnnnnnnnnnnnnnnnnnnnnnnnnnnnnnnnnnnnnnnnnnnnnnnnnnnnnnnnnnnnnnnnnnnnnnnnnnnnnnnnnnnnnnnnnnnnnnnnnnnnnnnnnnnnnnnnnnnnnnnnnnnnnnnnnnnnnnnnnnnnnnnnnnnnnnnnnnnnnnnnnnnnnnnnnnnnnnnnnnnnnnnnnnnnnnnnnnnnnnnnnnnnnnnnnnnnnnnnnnnnnnnnnnnnnnnnnnnnnnnnnnnnnnnnnnnnnnnnnnnnnnnnnnnnnnnnnnnnnnnnnnnnnnnnnnnnnnnnnnnnnnnnnnnnnnnnnnnnnnnnnnnnnnnnnnnnnnnnnnnnnnnnnnnnnnnnnnnnnnnnnnnnnnnnnnnnnnnnnnnnnnnnnnnnnnnnnnnnnnnnnnnnnnnnnnnnnnnnnnnnnnnnnnnnnnnnnnnnnnnnnnnnnnnnnnnnnnnnnnnnnnnnnnnnnnnnnnnnnnnnnnnnnnnnnnnnnnnnnnnnnnnnnnnnnnnnnnnnnnnnnnnnnnnnnnnnnnnnnnnnnnnnnnnnnnnnnnnnnnnnnnnnnnnnnnnnnnnnnnnnnnnnnnnnnnnnnnnnnnnnnnnnnnnnnnnnnnnnnnnnnnnnnnnnnnnnnnnnnnnnnnnnnnnnnnnnnnnnnnnnnnnnnnnnnnnnnnnnnnnnnnnnnnnnnnnnnnnnnnnnnnnnnnnnnnnnnnnnnnnnnnnnnnnnnnnnnnnnnnnnnnnnnnnnnnnnnnnnnnnnnnnnnnnnnnnnnnnnnnnnnnnnnnnnnnnnnnnnnnnnnnnnnnnnnnnnnnnnnnnnnnnnnnnnnnnnnnnnnnnnnnnnnnnnnnnnnnnnnnnnnnnnnnnnnnnnnnnnnnnnnnnnnnnnnnnnnnnnnnnnnnnnnnnnnnnnnnnnnnnnnnnnnnnnnnnnnnnnnnnnnnnnnnnnnnnnnnnnnnnnnnnnnnnnnnnnnnnnnnnnnnnnnnnnnnnnnnnnnnnnnnnnnnnnnnnnnnnnnnnnnnnnnnnnnnnnnnnnnnnnnnnnnnnnnnnnnnnnnnnnnnnnnnnnnnnnnnnnnnnnnnnnnnnnnnnnnnnnnnnnnnnnnnnnnnnnnnnnnnnnnnnnnnnnnnnnnnnnnnnnnnnnnnnnnnnnnnnnnnnnnnnnnnnnnnnnnnnnnnnnnnnnnnnnnnnnnnnnnnnnnnnnnnnnnnnnnnnnnnnnnnnnnnnnnnnnnnnnnnnnnnnnnnnnnnnnnnnnnnnnnnnnnnnnnnnnnnnnnnnnnnnnnnnnnnnnnnnnnnnnnnnnnnnnnnnnnnnnnnnnnnnnnnnnnnnnnnnnnnnnnnnnnnnnnnnnnnnnnnnnnnnnnnnnnnnnnnnnnnnnnnnnnnnnnnnnnnnnnnnnnnnnnnnnnnnnnnnnnnnnnnnnnnnnnnnnnnnnnnnnnnnnnnnnnnnnnnnnnnnnnnnnnnnnnnnnnnnnnnnnnnnnnnnnnnnnnnnnnnnnnnnnnnnnnnnnnnnnnnnnnnnnnnnnnnnnnnnnnnnnnnnnnnnnnnnnnnnnnnnnnnnnnnnnnnnnnnnnnnnnnnnnnnnnnnnnnnnnnnnnnnnnnnnnnnnnnnnnnnnnnnnnnnnnnnnnnnnnnnnnnnnnnnnnnnnnnnnnnnnnnnnnnnnnnnnnnnnnnnnnnnnnnnnnnnnnnnnnnnnnnnnnnnnnnnnnnnnnnnnnnnnnnnnnnnnnnnnnnnnnnnnnnnnnnnnnnnnnnnnnnnnnnnnnnnnnnnnnnnnnnnnnnnnnnnnnnnnnnnnnnnnnnnnnnnnnnnnnnnnnnnnnnnnnnnnnnnnnnnnnnnnnnnnnnnnnnnnnnnnnnnnnnnnnnnnnnnnnnnnnnnnnnnnnnnnnnnnnnnnnnnnnnnnnnnnnnnnnnnnnnnnnnnnnnnnnnnnnnnnnnnnnnnnnnnnnnnnnnnnnnnnnnnnnnnnnnnnnnnnnnnnnnnnnnnnnnnnnnnnnnnnnnnnnnnnnnnnnnnnnnnnnnnnnnnnnnnnnnnnnnnnnnnnnnnnnnnnnnnnnnnnnnnnnnnnnnnnnnnnnnnnnnnnnnnnnnnnnnnnnnnnnnnnnnnnnnnnnnnnnnnnnnnnnnnnnnnnnnnnnnnnnnnnnnnnnnnnnnnnnnnnnnnnnnnnnnnnnnnnnnnnnnnnnnnnnnnnnnnnnnnnnnnnnnnnnnnnnnnnnnnnnnnnnnnnnnnnnnnnnnnnnnnnnnnnnnnnnnnnnnnnnnnnnnnnnnnnnnnnnnnnnnnnnnnnnnnnnnnnnnnnnnnnnnnnnnnnnnnnnnnnnnnnnnnnnnnnnnnnnnnnnnnnnnnnnnnnnnnnnnnnnnnnnnnnnnnnnnnnnnnnnnnnnnnnnnnnnnnnnnnnnnnnnnnnnnnnnnnnnnnnnnnnnnnnnnnnnnnnnnnnnnnnnnnnnnnnnnnnnnnnnnnnnnnnnnnnnnnnnnnnnnnnnnnnnnnnnnnnnnnnnnnnnnnnnnnnnnnnnnnnnnnnnnnnnnnnnnnnnnnnnnnnnnnnnnnnnnnnnnnnnnnnnnnnnnnnnnnnnnnnnnnnnnnnnnnnnnnnnnnnnnnnnnnnnnnnnnnnnnnnnnnnnnnnnnnnnnnnnnnnnnnnnnnnnnnnnnnnnnnnnnnnnnnnnnnnnnnnnnnnnnnnnnnnnnnnnnnnnnnnnnnnnnnnnnnnnnnnnnnnnnnnnnnnnnnnnnnnnnnnnnnnnnnnnnnnnnnnnnnnnnnnnnnnnnnnnnnnnnnnnnnnnnnnnnnnnnnnnnnnnnnnnnnnnnnnnnnnnnnnnnnnnnnnnnnnnnnnnnnnnnnnnnnnnnnnnnnnnnnnnnnnnnnnnnnnnnnnnnnnnnnnnnnnnnnnnnnnnnnnnnnnnnnnnnnnnnnnnnnnnnnnnnnnnnnnnnnnnnnnnnnnnnnnnnnnnnnnnnnnnnnnnnnnnnnnnnnnnnnnnnnnnnnnnnnnnnnnnnnnnnnnnnnnnnnnnnnnnnnnnnnnnnnnnnnnnnnnnnnnnnnnnnnnnnnnnnnnnnnnnnnnnnnnnnnnnnnnnnnnnnnnnnnnnnnnnnnnnnnnnnnnnnnnnnnnnnnnnnnnnnnnnnnnnnnnnnnnnnnnnnnnnnnnnnnnnnnnnnnnnnnnnnnnnnnnnnnnnnnnnnnnnnnnnnnnnnnnnnnnnnnnnnnnnnnnnnnnnnnnnnnnnnnnnnnnnnnnnnnnnnnnnnnnnnnnnnnnnnnnnnnnnnnnnnnnnnnnnnnnnnnnnnnnnnnnnnnnnnnnnnnnnnnnnnnnnnnnnnnnnnnnnnnnnnnnnnnnnnnnnnnnnnnnnnnnnnnnnnnnnnnnnnnnnnnnnnnnnnnnnnnnnnnnnnnnnnnnnnnnnnnnnnnnnnnnnnnnnnnnnnnnnnnnnnnnnnnnnnnnnnnnnnnnnnnnnnnnnnnnnnnnnnnnnnnnnnnnnnnnnnnnnnnnnnnnnnnnnnnnnnnnnnnnnnnnnnnnnnnnnnnnnnnnnnnnnnnnnnnnnnnnnnnnnnnnnnnnnnnnnnnnnnnnnnnnnnnnnnnnnnnnnnnnnnnnnnnnnnnnnnnnnnnnnnnnnnnnnnnnnnnnnnnnnnnnnnnnnnnnnnnnnnnnnnnnnnnnnnnnnnnnnnnnnnnnnnnnnnnnnnnnnnnnnnnnnnnnnnnnnnnnnnnnnnnnnnnnnnnnnnnnnnnnnnnnnnnnnnnnnnnnnnnnnnnnnnnnnnnnnnnnnnnnnnnnnnnnnnnnnnnnnnnnnnnnnnnnnnnnnnnnnnnnnnnnnnnnnnnnnnnnnnnnnnnnnnnnnnnnnnnnnnnnnnnnnnnnnnnnnnnnnnnnnnnnnnnnnnnnnnnnnnnnnnnnnnnnnnnnnnnnnnnnnnnnnnnnnnnnnnnnnnnnnnnnnnnnnnnnnnnnnnnnnnnnnnnnnnnnnnnnnnnnnnnnnnnnnnnnnnnnnnnnnnnnnnnnnnnnnnnnnnnnnnnnnnnnnnnnnnnnnnnnnnnnnnnnnnnnnnnnnnnnnnnnnnnnnnnnnnnnnnnnnnnnnnnnnnnnnnnnnnnnnnnnnnnnnnnnnnnnnnnnnnnnnnnnnnnnnnnnnnnnnnnnnnnnnnnnnnnnnnnnnnnnnnnnnnnnnnnnnnnnnnnnnnnnnnnnnnnnnnnnnnnnnnnnnnnnnnnnnnnnnnnnnnnnnnnnnnnnnnnnnnnnnnnnnnnnnnnnnnnnnnnnnnnnnnnnnnnnnnnnnnnnnnnnnnnnnnnnnnnnnnnnnnnnnnnnnnnnnnnnnnnnnnnnnnnnnnnnnnnnnnnnnnnnnnnnnnnnnnnnnnnnnnnnnnnnnnnnnnnnnnnnnnnnnnnnnnnnnnnnnnnnnnnnnnnnnnnnnnnnnnnnnnnnnnnnnnnnnnnnnnnnnnnnnnnnnnnnnnnnnnnnnnnnnnnnnnnnnnnnnnnnnnnnnnnnnnnnnnnnnnnnnnnnnnnnnnnnnnnnnnnnnnnnnnnnnnnnnnnnnnnnnnnnnnnnnnnnnnnnnnnnnnnnnnnnnnnnnnnnnnnnnnnnnnnnnnnnnnnnnnnnnnnnnnnnnnnnnnnnnnnnnnnnnnnnnnnnnnnnnnnnnnnnnnnnnnnnnnnnnnnnnnnnnnnnnnnnnnnnnnnnnnnnnnnnnnnnnnnnnnnnnnnnnnnnnnnnnnnnnnnnnnnnnnnnnnnnnnnnnnnnnnnnnnnnnnnnnnnnnnnnnnnnnnnnnnnnnnnnnnnnnnnnnnnnnnnnnnnnnnnnnnnnnnnnnnnnnnnnnnnnnnnnnnnnnnnnnnnnnnnnnnnnnnnnnnnnnnnnnnnnnnnnnnnnnnnnnnnnnnnnnnnnnnnnnnnnnnnnnnnnnnnnnnnnnnnnnnnnnnnnnnnnnnnnnnnnnnnnnnnnnnnnnnnnnnnnnnnnnnnnnnnnnnnnnnnnnnnnnnnnnnnnnnnnnnnnnnnnnnnnnnnnnnnnnnnnnnnnnnnnnnnnnnnnnnnnnnnnnnnnnnnnnnnnnnnnnnnnnnnnnnnnnnnnnnnnnnnnnnnnnnnnnnnnnnnnnnnnnnnnnnnnnnnnnnnnnnnnnnnnnnnnnnnnnnnnnnnnnnnnnnnnnnnnnnnnnnnnnnnnnnnnnnnnnnnnnnnnnnnnnnnnnnnnnnnnnnnnnnnnnnnnnnnnnnnnnnnnnnnnnnnnnnnnnnnnnnnnnnnnnnnnnnnnnnnnnnnnnnnnnnnnnnnnnnnnnnnnnnnnnnnnnnnnnnnnnnnnnnnnnnnnnnnnnnnnnnnnnnnnnnnnnnnnnnnnnnnnnnnnnnnnnnnnnnnnnnnnnnnnnnnnnnnnnnnnnnnnnnnnnnnnnnnnnnnnnnnnnnnnnnnnnnnnnnnnnnnnnnnnnnnnnnnnnnnnnnnnnnnnnnnnnnnnnnnnnnnnnnnnnnnnnnnnnnnnnnnnnnnnnnnnnnnnnnnnnnnnnnnnnnnnnnnnnnnnnnnnnnnnnnnnnnnnnnnnnnnnnnnnnnnnnnnnnnnnnnnnnnnnnnnnnnnnnnnnnnnnnnnnnnnnnnnnnnnnnnnnnnnnnnnnnnnnnnnnnnnnnnnnnnnnnnnnnnnnnnnnnnnnnnnnnnnnnnnnnnnnnnnnnnnnnnnnnnnnnnnnnnnnnnnnnnnnnnnnnnnnnnnnnnnnnnnnnnnnnnnnnnnnnnnnnnnnnnnnnnnnnnnnnnnnnnnnnnnnnnnnnnnnnnnnnnnnnnnnnnnnnnnnnnnnnnnnnnnnnnnnnnnnnnnnnnnnnnnnnnnnnnnnnnnnnnnnnnnnnnnnnnnnnnnnnnnnnnnnnnnnnnnnnnnnnnnnnnnnnnnnnnnnnnnnnnnnnnnnnnnnnnnnnnnnnnnnnnnnnnnnnnnnnnnnnnnnnnnnnnnnnnnnnnnnnnnnnnnnnnnnnnnnnnnnnnnnnnnnnnnnnnnnnnnnnnnnnnnnnnnnnnnnnnnnnnnnnnnnnnnnnnnnnnnnnnnnnnnnnnnnnnnnnnnnnnnnnnnnnnnnnnnnnnnnnnnnnnnnnnnnnnnnnnnnnnnnnnnnnnnnnnnnnnnnnnnnnnnnnnnnnnnnnnnnnnnnnnnnnnnnnnnnnnnnnnnnnnnnnnnnnnnnnnnnnnnnnnnnnnnnnnnnnnnnnnnnnnnnnnnnnnnnnnnnnnnnnnnnnnnnnnnnnnnnnnnnnnnnnnnnnnnnnnnnnnnnnnnnnnnnnnnnnnnnnnnnnnnnnnnnnnnnnnnnnnnnnnnnnnnnnnnnnnnnnnnnnnnnnnnnnnnnnnnnnnnnnnnnnnnnnnnnnnnnnnnnnnnnnnnnnnnnnnnnnnnnnnnnnnnnnnnnnnnnnnnnnnnnnnnnnnnnnnnnnnnnnnnnnnnnnnnnnnnnnnnnnnnnnnnnnnnnnnnnnnnnnnnnnnnnnnnnnnnnnnnnnnnnnnnnnnnnnnnnnnnnnnnnnnnnnnnnnnnnnnnnnnnnnnnnnnnnnnnnnnnnnnnnnnnnnnnnnnnnnnnnnnnnnnnnnnnnnnnnnnnnnnnnnnnnnnnnnnnnnnnnnnnnnnnnnnnnnnnnnnnnnnnnnnnnnnnnnnnnnnnnnnnnnnnnnnnnnnnnnnnnnnnnnnnnnnnnnnnnnnnnnnnnnnnnnnnnnnnnnnnnnnnnnnnnnnnnnnnnnnnnnnnnnnnnnnnnnnnnnnnnnnnnnnnnnnnnnnnnnnnnnnnnnnnnnnnnnnnnnnnnnnnnnnnnnnnnnnnnnnnnnnnnnnnnnnnnnnnnnnnnnnnnnnnnnnnnnnnnnnnnnnnnnnnnnnnnnnnnnnnnnnnnnnnnnnnnnnnnnnnnnnnnnnnnnnnnnnnnnnnnnnnnnnnnnnnnnnnnnnnnnnnnnnnnnnnnnnnnnnnnnnnnnnnnnnnnnnnnnnnnnnnnnnnnnnnnnnnnnnnnnnnnnnnnnnnnnnnnnnnnnnnnnnnnnnnnnnnnnnnnnnnnnnnnnnnnnnnnnnnnnnnnnnnnnnnnnnnnnnnnnnnnnnnnnnnnnnnnnnnnnnnnnnnnnnnnnnnnnnnnnnnnnnnnnnnnnnnnnnnnnnnnnnnnnnnnnnnnnnnnnnnnnnnnnnnnnnnnnnnnnnnnnnnnnnnnnnnnnnnnnnnnnnnnnnnnnnnnnnnnnnnnnnnnnnnnnnnnnnnnnnnnnnnnnnnnnnnnnnnnnnnnnnnnnnnnnnnnnnnnnnnnnnnnnnnnnnnnnnnnnnnnnnnnnnnnnnnnnnnnnnnnnnnnnnnnnnnnnnnnnnnnnnnnnnnnnnnnnnnnnnnnnnnnnnnnnnnnnnnnnnnnnnnnnnnnnnnnnnnnnnnnnnnnnnnnnnnnnnnnnnnnnnnnnnnnnnnnnnnnnnnnnnnnnnnnnnnnnnnnnnnnnnnnnnnnnnnnnnnnnnnnnnnnnnnnnnnnnnnnnnnnnnnnnnnnnnnnnnnnnnnnnnnnnnnnnnnnnnnnnnnnnnnnnnnnnnnnnnnnnnnnnnnnnnnnnnnnnnnnnnnnnnnnnnnnnnnnnnnnnnnnnnnnnnnnnnnnnnnnnnnnnnnnnnnnnnnnnnnnnnnnnnnnnnnnnnnnnnnnnnnnnnnnnnnnnnnnnnnnnnnnnnnnnnnnnnnnnnnnnnnnnnnnnnnnnnnnnnnnnnnnnnnnnnnnnnnnnnnnnnnnnnnnnnnnnnnnnnnnnnnnnnnnnnnnnnnnnnnnnnnnnnnnnnnnnnnnnnnnnnnnnnnnnnnnnnnnnnnnnnnnnnnnnnnnnnnnnnnnnnnnnnnnnnnnnnnnnnnnnnnnnnnnnnnnnnnnnnnnnnnnnnnnnnnnnnnnnnnnnnnnnnnnnnnnnnnnnnnnnnnnnnnnnnnnnnnnnnnnnnnnnnnnnnnnnnnnnnnnnnnnnnnnnnnnnnnnnnnnnnnnnnnnnnnnnnnnnnnnnnnnnnnnnnnnnnnnnnnnnnnnnnnnnnnnnnnnnnnnnnnnnnnnnnnnnnnnnnnnnnnnnnnnnnnnnnnnnnnnnnnnnnnnnnnnnnnnnnnnnnnnnnnnnnnnnnnnnnnnnnnnnnnnnnnnnnnnnnnnnnnnnnnnnnnnnnnnnnnnnnnnnnnnnnnnnnnnnnnnnnnnnnnnnnnnnnnnnnnnnnnnnnnnnnnnnnnnnnnnnnnnnnnnnnnnnnnnnnnnnnnnnnnnnnnnnnnnnnnnnnnnnnnnnnnnnnnnnnnnnnnnnnnnnnnnnnnnnnnnnnnnnnnnnnnnnnnnnnnnnnnnnnnnnnnnnnnnnnnnnnnnnnnnnnnnnnnnnnnnnnnnnnnnnnnnnnnnnnnnnnnnnnnnnnnnnnnnnnnnnnnnnnnnnnnnnnnnnnnnnnnnnnnnnnnnnnnnnnnnnnnnnnnnnnnnnnnnnnnnnnnnnnnnnnnnnnnnnnnnnnnnnnnnnnnnnnnnnnnnnnnnnnnnnnnnnnnnnnnnnnnnnnnnnnnnnnnnnnnnnnnnnnnnnnnnnnnnnnnnnnnnnnnnnnnnnnnnnnnnnnnnnnnnnnnnnnnnnnnnnnnnnnnnnnnnnnnnnnnnnnnnnnnnnnnnnnnnnnnnnnnnnnnnnnnnnnnnnnnnnnnnnnnnnnnnnnnnnnnnnnnnnnnnnnnnnnnnnnnnnnnnnnnnnnnnnnnnnnnnnnnnnnnnnnnnnnnnnnnnnnnnnnnnnnnnnnnnnnnnnnnnnnnnnnnnnnnnnnnnnnnnnnnnnnnnnnnnnnnnnnnnnnnnnnnnnnnnnnnnnnnnnnnnnnnnnnnnnnnnnnnnnnnnnnnnnnnnnnnnnnnnnnnnnnnnnnnnnnnnnnnnnnnnnnnnnnnnnnnnnnnnnnnnnnnnnnnnnnnnnnnnnnnnnnnnnnnnnnnnnnnnnnnnnnnnnnnnnnnnnnnnnnnnnnnnnnnnnnnnnnnnnnnnnnnnnnnnnnnnnnnnnnnnnnnnnnnnnnnnnnnnnnnnnnnnnnnnnnnnnnnnnnnnnnnnnnnnnnnnnnnnnnnnnnnnnnnnnnnnnnnnnnnnnnnnnnnnnnnnnnnnnnnnnnnnnnnnnnnnnnnnnnnnnnnnnnnnnnnnnnnnnnnnnnnnnnnnnnnnnnnnnnnnnnnnnnnnnnnnnnnnnnnnnnnnnnnnnnnnnnnnnnnnnnnnnnnnnnnnnnnnnnnnnnnnnnnnnnnnnnnnnnnnnnnnnnnnnnnnnnnnnnnnnnnnnnnnnnnnnnnnnnnnnnnnnnnnnnnnnnnnnnnnnnnnnnnnnnnnnnnnnnnnnnnnnnnnnnnnnnnnnnnnnnnnnnnnnnnnnnnnnnnnnnnnnnnnnnnnnnnnnnnnnnnnnnnnnnnnnnnnnnnnnnnnnnnnnnnnnnnnnnnnnnnnnnnnnnnnnnnnnnnnnnnnnnnnnnnnnnnnnnnnnnnnnnnnnnnnnnnnnnnnnnnnnnnnnnnnnnnnnnnnnnnnnnnnnnnnnnnnnnnnnnnnnnnnnnnnnnnnnnnnnnnnnnnnnnnnnnnnnnnnnnnnnnnnnnnnnnnnnnnnnnnnnnnnnnnnnnnnnnnnnnnnnnnnnnnnnnnnnnnnnnnnnnnnnnnnnnnnnnnnnnnnnnnnnnnnnnnnnnnnnnnnnnnnnnnnnnnnnnnnnnnnnnnnnnnnnnnnnnnnnnnnnnnnnnnnnnnnnnnnnnnnnnnnnnnnnnnnnnnnnnnnnnnnnnnnnnnnnnnnnnnnnnnnnnnnnnnnnnnnnnnnnnnnnnnnnnnnnnnnnnnnnnnnnnnnnnnnnnnnnnnnnnnnnnnnnnnnnnnnnnnnnnnnnnnnnnnnnnnnnnnnnnnnnnnnnnnnnnnnnnnnnnnnnnnnnnnnnnnnnnnnnnnnnnnnnnnnnnnnnnnnnnnnnnnnnnnnnnnnnnnnnnnnnnnnnnnnnnnnnnnnnnnnnnnnnnnnnnnnnnnnnnnnnnnnnnnnnnnnnnnnnnnnnnnnnnnnnnnnnnnnnnnnnnnnnnnnnnnnnnnnnnnnnnnnnnnnnnnnnnnnnnnnnnnnnnnnnnnnnnnnnnnnnnnnnnnnnnnnnnnnnnnnnnnnnnnnnnnnnnnnnnnnnnnnnnnnnnnnnnnnnnnnnnnnnnnnnnnnnnnnnnnnnnnnnnnnnnnnnnnnnnnnnnnnnnnnnnnnnnnnnnnnnnnnnnnnnnnnnnnnnnnnnnnnnnnnnnnnnnnnnnnnnnnnnnnnnnnnnnnnnnnnnnnnnnnnnnnnnnnnnnnnnnnnnnnnnnnnnnnnnnnnnnnnnnnnnnnnnnnnnnnnnnnnnnnnnnnnnnnnnnnnnnnnnnnnnnnnnnnnnnnnnnnnnnnnnnnnnnnnnnnnnnnnnnnnnnnnnnnnnnnnnnnnnnnnnnnnnnnnnnnnnnnnnnnnnnnnnnnnnnnnnnnnnnnnnnnnnnnnnnnnnnnnnnnnnnnnnnnnnnnnnnnnnnnnnnnnnnnnnnnnnnnnnnnnnnnnnnnnnnnnnnnnnnnnnnnnnnnnnnnnnnnnnnnnnnnnnnnnnnnnnnnnnnnnnnnnnnnnnnnnnnnnnnnnnnnnnnnnnnnnnnnnnnnnnnnnnnnnnnnnnnnnnnnnnnnnnnnnnnnnnnnnnnnnnnnnnnnnnnnnnnnnnnnnnnnnnnnnnnnnnnnnnnnnnnnnnnnnnnnnnnnnnnnnnnnnnnnnnnnnnnnnnnnnnnnnnnnnnnnnnnnnnnnnnnnnnnnnnnnnnnnnnnnnnnnnnnnnnnnnnnnnnnnnnnnnnnnnnnnnnnnnnnnnnnnnnnnnnnnnnnnnnnnnnnnnnnnnnnnnnnnnnnnnnnnnnnnnnnnnnnnnnnnnnnnnnnnnnnnnnnnnnnnnnnnnnnnnnnnnnnnnnnnnnnnnnnnnnnnnnnnnnnnnnnnnnnnnnnnnnnnnnnnnnnnnnnnnnnnnnnnnnnnnnnnnnnnnnnnnnnnnnnnnnnnnnnnnnnnnnnnnnnnnnnnnnnnnnnnnnnnnnnnnnnnnnnnnnnnnnnnnnnnnnnnnnnnnnnnnnnnnnnnnnnnnnnnnnnnnnnnnnnnnnnnnnnnnnnnnnnnnnnnnnnnnnnnnnnnnnnnnnnnnnnnnnnnnnnnnnnnnnnnnnnnnnnnnnnnnnnnnnnnnnnnnnnnnnnnnnnnnnnnnnnnnnnnnnnnnnnnnnnnnnnnnnnnnnnnnnnnnnnnnnnnnnnnnnnnnnnnnnnnnnnnnnnnnnnnnnnnnnnnnnnnnnnnnnnnnnnnnnnnnnnnnnnnnnnnnnnnnnnnnnnnnnnnnnnnnnnnnnnnnnnnnnnnnnnnnnnnnnnnnnnnnnnnnnnnnnnnnnnnnnnnnnnnnnnnnnnnnnnnnnnnnnnnnnnnnnnnnnnnnnnnnnnnnnnnnnnnnnnnnnnnnnnnnnnnnnnnnnnnnnnnnnnnnnnnnnnnnnnnnnnnnnnnnnnnnnnnnnnnnnnnnnnnnnnnnnnnnnnnnnnnnnnnnnnnnnnnnnnnnnnnnnnnnnnnnnnnnnnnnnnnnnnnnnnnnnnnnnnnnnnnnnnnnnnnnnnnnnnnnnnnnnnnnnnnnnnnnnnnnnnnnnnnnnnnnnnnnnnnnnnnnnnnnnnnnnnnnnnnnnnnnnnnnnnnnnnnnnnnnnnnnnnnnnnnnnnnnnnnnnnnnnnnnnnnnnnnnnnnnnnnnnnnnnnnnnnnnnnnnnnnnnnnnnnnnnnnnnnnnnnnnnnnnnnnnnnnnnnnnnnnnnnnnnnnnnnnnnnnnnnnnnnnnnnnnnnnnnnnnnnnnnnnnnnnnnnnnnnnnnnnnnnnnnnnnnnnnnnnnnnnnnnnnnnnnnnnnnnnnnnnnnnnnnnnnnnnnnnnnnnnnnnnnnnnnnnnnnnnnnnnnnnnnnnnnnnnnnnnnnnnnnnnnnnnnnnnnnnnnnnnnnnnnnnnnnnnnnnnnnnnnnnnnnnnnnnnnnnnnnnnnnnnnnnnnnnnnnnnnnnnnnnnnnnnnnnnnnnnnnnnnnnnnnnnnnnnnnnnnnnnnnnnnnnnnnnnnnnnnnnnnnnnnnnnnnnnnnnnnnnnnnnnnnnnnnnnnnnnnnnnnnnnnnnnnnnnnnnnnnnnnnnnnnnnnnnnnnnnnnnnnnnnnnnnnnnnnnnnnnnnnnnnnnnnnnnnnnnnnnnnnnnnnnnnnnnnnnnnnnnnnnnnnnnnnnnnnnnnnnnnnnnnnnnnnnnnnnnnnnnnnnnnnnnnnnnnnnnnnnnnnnnnnnnnnnnnnnnnnnnnnnnnnnnnnnnnnnnnnnnnnnnnnnnnnnnnnnnnnnnnnnnnnnnnnnnnnnnnnnnnnnnnnnnnnnnnnnnnnnnnnnnnnnnnnnnnnnnnnnnnnnnnnnnnnnnnnnnnnnnnnnnnnnnnnnnnnnnnnnnnnnnnnnnnnnnnnnnnnnnnnnnnnnnnnnnnnnnnnnnnnnnnnnnnnnnnnnnnnnnnnnnnnnnnnnnnnnnnnnnnnnnnnnnnnnnnnnnnnnnnnnnnnnnnnnnnnnnnnnnnnnnnnnnnnnnnnnnnnnnnnnnnnnnnnnnnnnnnnnnnnnnnnnnnnnnnnnnnnnnnnnnnnnnnnnnnnnnnnnnnnnnnnnnnnnnnnnnnnnnnnnnnnnnnnnnnnnnnnnnnnnnnnnnnnnnnnnnnnnnnnnnnnnnnnnnnnnnnnnnnnnnnnnnnnnnnnnnnnnnnnnnnnnnnnnnnnnnnnnnnnnnnnnnnnnnnnnnnnnnnnnnnnnnnnnnnnnnnnnnnnnnnnnnnnnnnnnnnnnnnnnnnnnnnnnnnnnnnnnnnnnnnnnnnnnnnnnnnnnnnnnnnnnnnnnnnnnnnnnnnnnnnnnnnnnnnnnnnnnnnnnnnnnnnnnnnnnnnnnnnnnnnnnnnnnnnnnnnnnnnnnnnnnnnnnnnnnnnnnnnnnnnnnnnnnnnnnnnnnnnnnnnnnnnnnnnnnnnnnnnnnnnnnnnnnnnnnnnnnnnnnnnnnnnnnnnnnnnnnnnnnnnnnnnnnnnnnnnnnnnnnnnnnnnnnnnnnnnnnnnnnnnnnnnnnnnnnnnnnnnnnnnnnnnnnnnnnnnnnnnnnnnnnnnnnnnnnnnnnnnnnnnnnnnnnnnnnnnnnnnnnnnnnnnnnnnnnnnnnnnnnnnnnnnnnnnnnnnnnnnnnnnnnnnnnnnnnnnnnnnnnnnnnnnnnnnnnnnnnnnnnnnnnnnnnnnnnnnnnnnnnnnnnnnnnnnnnnnnnnnnnnnnnnnnnnnnnnnnnnnnnnnnnnnnnnnnnnnnnnnnnnnnnnnnnnnnnnnnnnnnnnnnnnnnnnnnnnnnnnnnnnnnnnnnnnnnnnnnnnnnnnnnnnnnnnnnnnnnnnnnnnnnnnnnnnnnnnnnnnnnnnnnnnnnnnnnnnnnnnnnnnnnnnnnnnnnnnnnnnnnnnnnnnnnnnnnnnnnnnnnnnnnnnnnnnnnnnnnnnnnnnnnnnnnnnnnnnnnnnnnnnnnnnnnnnnnnnnnnnnnnnnnnnnnnnnnnnnnnnnnnnnnnnnnnnnnnnnnnnnnnnnnnnnnnnnnnnnnnnnnnnnnnnnnnnnnnnnnnnnnnnnnnnnnnnnnnnnnnnnnnnnnnnnnnnnnnnnnnnnnnnnnnnnnnnnnnnnnnnnnnnnnnnnnnnnnnnnnnnnnnnnnnnnnnnnnnnnnnnnnnnnnnnnnnnnnnnnnnnnnnnnnnnnnnnnnnnnnnnnnnnnnnnnnnnnnnnnnnnnnnnnnnnnnnnnnnnnnnnnnnnnnnnnnnnnnnnnnnnnnnnnnnnnnnnnnnnnnnnnnnnnnnnnnnnnnnnnnnnnnnnnnnnnnnnnnnnnnnnnnnnnnnnnnnnnnnnnnnnnnnnnnnnnnnnnnnnnnnnnnnnnnnnnnnnnnnnnnnnnnnnnnnnnnnnnnnnnnnnnnnnnnnnnnnnnnnnnnnnnnnnnnnnnnnnnnnnnnnnnnnnnnnnnnnnnnnnnnnnnnnnnnnnnnnnnnnnnnnnnnnnnnnnnnnnnnnnnnnnnnnnnnnnnnnnnnnnnnnnnnnnnnnnnnnnnnnnnnnnnnnnnnnnnnnnnnnnnnnnnnnnnnnnnnnnnnnnnnnnnnnnnnnnnnnnnnnnnnnnnnnnnnnnnnnnnnnnnnnnnnnnnnnnnnnnnnnnnnnnnnnnnnnnnnnnnnnnnnnnnnnnnnnnnnnnnnnnnnnnnnnnnnnnnnnnnnnnnnnnnnnnnnnnnnnnnnnnnnnnnnnnnnnnnnnnnnnnnnnnnnnnnnnnnnnnnnnnnnnnnnnnnnnnnnnnnnnnnnnnnnnnnnnnnnnnnnnnnnnnnnnnnnnnnnnnnnnnnnnnnnnnnnnnnnnnnnnnnnnnnnnnnnnnnnnnnnnnnnnnnnnnnnnnnnnnnnnnnnnnnnnnnnnnnnnnnnnnnnnnnnnnnnnnnnnnnnnnnnnnnnnnnnnnnnnnnnnnnnnnnnnnnnnnnnnnnnnnnnnnnnnnnnnnnnnnnnnnnnnnnnnnnnnnnnnnnnnnnnnnnnnnnnnnnnnnnnnnnnnnnnnnnnnnnnnnnnnnnnnnnnnnnnnnnnnnnnnnnnnnnnnnnnnnnnnnnnnnnnnnnnnnnnnnnnnnnnnnnnnnnnnnnnnnnnnnnnnnnnnnnnnnnnnnnnnnnnnnnnnnnnnnnnnnnnnnnnnnnnnnnnnnnnnnnnnnnnnnnnnnnnnnnnnnnnnnnnnnnnnnnnnnnnnnnnnnnnnnnnnnnnnnnnnnnnnnnnnnnnnnnnnnnnnnnnnnnnnnnnnnnnnnnnnnnnnnnnnnnnnnnnnnnnnnnnnnnnnnnnnnnnnnnnnnnnnnnnnnnnnnnnnnnnnnnnnnnnnnnnnnnnnnnnnnnnnnnnnnnnnnnnnnnnnnnnnnnnnnnnnnnnnnnnnnnnnnnnnnnnnnnnnnnnnnnnnnnnnnnnnnnnnnnnnnnnnnnnnnnnnnnnnnnnnnnnnnnnnnnnnnnnnnnnnnnnnnnnnnnnnnnnnnnnnnnnnnnnnnnnnnnnnnnnnnnnnnnnnnnnnnnnnnnnnnnnnnnnnnnnnnnnnnnnnnnnnnnnnnnnnnnnnnnnnnnnnnnnnnnnnnnnnnnnnnnnnnnnnnnnnnnnnnnnnnnnnnnnnnnnnnnnnnnnnnnnnnnnnnnnnnnnnnnnnnnnnnnnnnnnnnnnnnnnnnnnnnnnnnnnnnnnnnnnnnnnnnnnnnnnnnnnnnnnnnnnnnnnnnnnnnnnnnnnnnnnnnnnnnnnnnnnnnnnnnnnnnnnnnnnnnnnnnnnnnnnnnnnnnnnnnnnnnnnnnnnnnnnnnnnnnnnnnnnnnnnnnnnnnnnnnnnnnnnnnnnnnnnnnnnnnnnnnnnnnnnnnnnnnnnnnnnnnnnnnnnnnnnnnnnnnnnnnnnnnnnnnnnnnnnnnnnnnnnnnnnnnnnnnnnnnnnnnnnnnnnnnnnnnnnnnnnnnnnnnnnnnnnnnnnnnnnnnnnnnnnnnnnnnnnnnnnnnnnnnnnnnnnnnnnnnnnnnnnnnnnnnnnnnnnnnnnnnnnnnnnnnnnnnnnnnnnnnnnnnnnnnnnnnnnnnnnnnnnnnnnnnnnnnnnnnnnnnnnnnnnnnnnnnnnnnnnnnnnnnnnnnnnnnnnnnnnnnnnnnnnnnnnnnnnnnnnnnnnnnnnnnnnnnnnnnnnnnnnnnnnnnnnnnnnnnnnnnnnnnnnnnnnnnnnnnnnnnnnnnnnnnnnnnnnnnnnnnnnnnnnnnnnnnnnnnnnnnnnnnnnnnnnnnnnnnnnnnnnnnnnnnnnnnnnnnnnnnnnnnnnnnnnnnnnnnnnnnnnnnnnnnnnnnnnnnnnnnnnnnnnnnnnnnnnnnnnnnnnnnnnnnnnnnnnnnnnnnnnnnnnnnnnnnnnnnnnnnnnnnnnnnnnnnnnnnnnnnnnnnnnnnnnnnnnnnnnnnnnnnnnnnnnnnnnnnnnnnnnnnnnnnnnnnnnnnnnnnnnnnnnnnnnnnnnnnnnnnnnnnnnnnnnnnnnnnnnnnnnnnnnnnnnnnnnnnnnnnnnnnnnnnnnnnnnnnnnnnnnnnnnnnnnnnnnnnnnnnnnnnnnnnnnnnnnnnnnnnnnnnnnnnnnnnnnnnnnnnnnnnnnnnnnnnnnnnnnnnnnnnnnnnnnnnnnnnnnnnnnnnnnnnnnnnnnnnnnnnnnnnnnnnnnnnnnnnnnnnnnnnnnnnnnnnnnnnnnnnnnnnnnnnnnnnnnnnnnnnnnnnnnnnnnnnnnnnnnnnnnnnnnnnnnnnnnnnnnnnnnnnnnnnnnnnnnnnnnnnnnnnnnnnnnnnnnnnnnnnnnnnnnnnnnnnnnnnnnnnnnnnnnnnnnnnnnnnnnnnnnnnnnnnnnnnnnnnnnnnnnnnnnnnnnnnnnnnnnnnnnnnnnnnnnnnnnnnnnnnnnnnnnnnnnnnnnnnnnnnnnnnnnnnnnnnnnnnnnnnnnnnnnnnnnnnnnnnnnnnnnnnnnnnnnnnnnnnnnnnnnnnnnnnnnnnnnnnnnnnnnnnnnnnnnnnnnnnnnnnnnnnnnnnnnnnnnnnnnnnnnnnnnnnnnnnnnnnnnnnnnnnnnnnnnnnnnnnnnnnnnnnnnnnnnnnnnnnnnnnnnnnnnnnnnnnnnnnnnnnnnnnnnnnnnnnnnnnnnnnnnnnnnnnnnnnnnnnnnnnnnnnnnnnnnnnnnnnnnnnnnnnnnnnnnnnnnnnnnnnnnnnnnnnnnnnnnnnnnnnnnnnnnnnnnnnnnnnnnnnnnnnnnnnnnnnnnnnnnnnnnnnnnnnnnnnnnnnnnnnnnnnnnnnnnnnnnnnnnnnnnnnnnnnnnnnnnnnnnnnnnnnnnnnnnnnnnnnnnnnnnnnnnnnnnnnnnnnnnnnnnnnnnnnnnnnnnnnnnnnnnnnnnnnnnnnnnnnnnnnnnnnnnnnnnnnnnnnnnnnnnnnnnnnnnnnnnnnnnnnnnnnnnnnnnnnnnnnnnnnnnnnnnnnnnnnnnnnnnnnnnnnnnnnnnnnnnnnnnnnnnnnnnnnnnnnnnnnnnnnnnnnnnnnnnnnnnnnnnnnnnnnnnnnnnnnnnnnnnnnnnnnnnnnnnnnnnnnnnnnnnnnnnnnnnnnnnnnnnnnnnnnnnnnnnnnnnnnnnnnnnnnnnnnnnnnnnnnnnnnnnnnnnnnnnnnnnnnnnnnnnnnnnnnnnnnnnnnnnnnnnnnnnnnnnnnnnnnnnnnnnnnnnnnnnnnnnnnnnnnnnnnnnnnnnnnnnnnnnnnnnnnnnnnnnnnnnnnnnnnnnnnnnnnnnnnnnnnnnnnnnnnnnnnnnnnnnnnnnnnnnnnnnnnnnnnnnnnnnnnnnnnnnnnnnnnnnnnnnnnnnnnnnnnnnnnnnnnnnnnnnnnnnnnnnnnnnnnnnnnnnnnnnnnnnnnnnnnnnnnnnnnnnnnnnnnnnnnnnnnnnnnnnnnnnnnnnnnnnnnnnnnnnnnnnnnnnnnnnnnnnnnnnnnnnnnnnnnnnnnnnnnnnnnnnnnnnnnnnnnnnnnnnnnnnnnnnnnnnnnnnnnnnnnnnnnnnnnnnnnnnnnnnnnnnnnnnnnnnnnnnnnnnnnnnnnnnnnnnnnnnnnnnnnnnnnnnnnnnnnnnnnnnnnnnnnnnnnnnnnnnnnnnnnnnnnnnnnnnnnnnnnnnnnnnnnnnnnnnnnnnnnnnnnnnnnnnnnnnnnnnnnnnnnnnnnnnnnnnnnnnnnnnnnnnnnnnnnnnnnnnnnnnnnnnnnnnnnnnnnnnnnnnnnnnnnnnnnnnnnnnnnnnnnnnnnnnnnnnnnnnnnnnnnnnnnnnnnnnnnnnnnnnnnnnnnnnnnnnnnnnnnnnnnnnnnnnnnnnnnnnnnnnnnnnnnnnnnnnnnnnnnnnnnnnnnnnnnnnnnnnnnnnnnnnnnnnnnnnnnnnnnnnnnnnnnnnnnnnnnnnnnnnnnnnnnnnnnnnnnnnnnnnnnnnnnnnnnnnnnnnnnnnnnnnnnnnnnnnnnnnnnnnnnnnnnnnnnnnnnnnnnnnnnnnnnnnnnnnnnnnnnnnnnnnnnnnnnnnnnnnnnnnnnnnnnnnnnnnnnnnnnnnnnnnnnnnnnnnnnnnnnnnnnnnnnnnnnnnnnnnnnnnnnnnnnnnnnnnnnnnnnnnnnnnnnnnnnnnnnnnnnnnnnnnnnnnnnnnnnnnnnnnnnnnnnnnnnnnnnnnnnnnnnnnnnnnnnnnnnnnnnnnnnnnnnnnnnnnnnnnnnnnnnnnnnnnnnnnnnnnnnnnnnnnnnnnnnnnnnnnnnnnnnnnnnnnnnnnnnnnnnnnnnnnnnnnnnnnnnnnnnnnnnnnnnnnnnnnnnnnnnnnnnnnnnnnnnnnnnnnnnnnnnnnnnnnnnnnnnnnnnnnnnnnnnnnnnnnnnnnnnnnnnnnnnnnnnnnnnnnnnnnnnnnnnnnnnnnnnnnnnnnnnnnnnnnnnnnnnnnnnnnnnnnnnnnnnnnnnnnnnnnnnnnnnnnnnnnnnnnnnnnnnnnnnnnnnnnnnnnnnnnnnnnnnnnnnnnnnnnnnnnnnnnnnnnnnnnnnnnnnnnnnnnnnnnnnnnnnnnnnnnnnnnnnnnnnnnnnnnnnnnnnnnnnnnnnnnnnnnnnnnnnnnnnnnnnnnnnnnnnnnnnnnnnnnnnnnnnnnnnnnnnnnnnnnnnnnnnnnnnnnnnnnnnnnnnnnnnnnnnnnnnnnnnnnnnnnnnnnnnnnnnnnnnnnnnnnnnnnnnnnnnnnnnnnnnnnnnnnnnnnnnnnnnnnnnnnnnnnnnnnnnnnnnnnnnnnnnnnnnnnnnnnnnnnnnnnnnnnnnnnnnnnnnnnnnnnnnnnnnnnnnnnnnnnnnnnnnnnnnnnnnnnnnnnnnnnnnnnnnnnnnnnnnnnnnnnnnnnnnnnnnnnnnnnnnnnnnnnnnnnnnnnnnnnnnnnnnnnnnnnnnnnnnnnnnnnnnnnnnnnnnnnnnnnnnnnnnnnnnnnnnnnnnnnnnnnnnnnnnnnnnnnnnnnnnnnnnnnnnnnnnnnnnnnnnnnnnnnnnnnnnnnnnnnnnnnnnnnnnnnnnnnnnnnnnnnnnnnnnnnnnnnnnnnnnnnnnnnnnnnnnnnnnnnnnnnnnnnnnnnnnnnnnnnnnnnnnnnnnnnnnnnnnnnnnnnnnnnnnnnnnnnnnnnnnnnnnnnnnnnnnnnnnnnnnnnnnnnnnnnnnnnnnnnnnnnnnnnnnnnnnnnnnnnnnnnnnnnnnnnnnnnnnnnnnnnnnnnnnnnnnnnnnnnnnnnnnnnnnnnnnnnnnnnnnnnnnnnnnnnnnnnnnnnnnnnnnnnnnnnnnnnnnnnnnnnnnnnnnnnnnnnnnnnnnnnnnnnnnnnnnnnnnnnnnnnnnnnnnnnnnnnnnnnnnnnnnnnnnnnnnnnnnnnnnnnnnnnnnnnnnnnnnnnnnnnnnnnnnnnnnnnnnnnnnnnnnnnnnnnnnnnnnnnnnnnnnnnnnnnnnnnnnnnnnnnnnnnnnnnnnnnnnnnnnnnnnnnnnnnnnnnnnnnnnnnnnnnnnnnnnnnnnnnnnnnnnnnnnnnnnnnnnnnnnnnnnnnnnnnnnnnnnnnnnnnnnnnnnnnnnnnnnnnnnnnnnnnnnnnnnnnnnnnnnnnnnnnnnnnnnnnnnnnnnnnnnnnnnnnnnnnnnnnnnnnnnnnnnnnnnnnnnnnnnnnnnnnnnnnnnnnnnnnnnnnnnnnnnnnnnnnnnnnnnnnnnnnnnnnnnnnnnnnnnnnnnnnnnnnnnnnnnnnnnnnnnnnnnnnnnnnnnnnnnnnnnnnnnnnnnnnnnnnnnnnnnnnnnnnnnnnnnnnnnnnnnnnnnnnnnnnnnnnnnnnnnnnnnnnnnnnnnnnnnnnnnnnnnnnnnnnnnnnnnnnnnnnnnnnnnnnnnnnnnnnnnnnnnnnnnnnnnnnnnnnnnnnnnnnnnnnnnnnnnnnnnnnnnnnnnnnnnnnnnnnnnnnnnnnnnnnnnnnnnnnnnnnnnnnnnnnnnnnnnnnnnnnnnnnnnnnnnnnnnnnnnnnnnnnnnnnnnnnnnnnnnnnnnnnnnnnnnnnnnnnnnnnnnnnnnnnnnnnnnnnnnnnnnnnnnnnnnnnnnnnnnnnnnnnnnnnnnnnnnnnnnnnnnnnnnnnnnnnnnnnnnnnnnnnnnnnnnnnnnnnnnnnnnnnnnnnnnnnnnnnnnnnnnnnnnnnnnnnnnnnnnnnnnnnnnnnnnnnnnnnnnnnnnnnnnnnnnnnnnnnnnnnnnnnnnnnnnnnnnnnnnnnnnnnnnnnnnnnnnnnnnnnnnnnnnnnnnnnnnnnnnnnnnnnnnnnnnnnnnnnnnnnnnnnnnnnnnnnnnnnnnnnnnnnnnnnnnnnnnnnnnnnnnnnnnnnnnnnnnnnnnnnnnnnnnnnnnnnnnnnnnnnnnnnnnnnnnnnnnnnnnnnnnnnnnnnnnnnnnnnnnnnnnnnnnnnnnnnnnnnnnnnnnnnnnnnnnnnnnnnnnnnnnnnnnnnnnnnnnnnnnnnnnnnnnnnnnnnnnnnnnnnnnnnnnnnnnnnnnnnnnnnnnnnnnnnnnnnnnnnnnnnnnnnnnnnnnnnnnnnnnnnnnnnnnnnnnnnnnnnnnnnnnnnnnnnnnnnnnnnnnnnnnnnnnnnnnnnnnnnnnnnnnnnnnnnnnnnnnnnnnnnnnnnnnnnnnnnnnnnnnnnnnnnnnnnnnnnnnnnnnnnnnnnnnnnnnnnnnnnnnnnnnnnnnnnnnnnnnnnnnnnnnnnnnnnnnnnnnnnnnnnnnnnnnnnnnnnnnnnnnnnnnnnnnnnnnnnnnnnnnnnnnnnnnnnnnnnnnnnnnnnnnnnnnnnnnnnnnnnnnnnnnnnnnnnnnnnnnnnnnnnnnnnnnnnnnnnnnnnnnnnnnnnnnnnnnnnnnnnnnnnnnnnnnnnnnnnnnnnnnnnnnnnnnnnnnnnnnnnnnnnnnnnnnnnnnnnnnnnnnnnnnnnnnnnnnnnnnnnnnnnnnnnnnnnnnnnnnnnnnnnnnnnnnnnnnnnnnnnnnnnnnnnnnnnnnnnnnnnnnnnnnnnnnnnnnnnnnnnnnnnnnnnnnnnnnnnnnnnnnnnnnnnnnnnnnnnnnnnnnnnnnnnnnnnnnnnnnnnnnnnnnnnnnnnnnnnnnnnnnnnnnnnnnnnnnnnnnnnnnnnnnnnnnnnnnnnnnnnnnnnnnnnnnnnnnnnnnnnnnnnnnnnnnnnnnnnnnnnnnnnnnnnnnnnnnnnnnnnnnnnnnnnnnnnnnnnnnnnnnnnnnnnnnnnnnnnnnnnnnnnnnnnnnnnnnnnnnnnnnnnnnnnnnnnnnnnnnnnnnnnnnnnnnnnnnnnnnnnnnnnnnnnnnnnnnnnnnnnnnnnnnnnnnnnnnnnnnnnnnnnnnnnnnnnnnnnnnnnnnnnnnnnnnnnnnnnnnnnnnnnnnnnnnnnnnnnnnnnnnnnnnnnnnnnnnnnnnnnnnnnnnnnnnnnnnnnnnnnnnnnnnnnnnnnnnnnnnnnnnnnnnnnnnnnnnnnnnnnnnnnnnnnnnnnnnnnnnnnnnnnnnnnnnnnnnnnnnnnnnnnnnnnnnnnnnnnnnnnnnnnnnnnnnnnnnnnnnnnnnnnnnnnnnnnnnnnnnnnnnnnnnnnnnnnnnnnnnnnnnnnnnnnnnnnnnnnnnnnnnnnnnnnnnnnnnnnnnnnnnnnnnnnnnnnnnnnnnnnnnnnnnnnnnnnnnnnnnnnnnnnnnnnnnnnnnnnnnnnnnnnnnnnnnnnnnnnnnnnnnnnnnnnnnnnnnnnnnnnnnnnnnnnnnnnnnnnnnnnnnnnnnnnnnnnnnnnnnnnnnnnnnnnnnnnnnnnnnnnnnnnnnnnnnnnnnnnnnnnnnnnnnnnnnnnnnnnnnnnnnnnnnnnnnnnnnnnnnnnnnnnnnnnnnnnnnnnnnnnnnnnnnnnnnnnnnnnnnnnnnnnnnnnnnnnnnnnnnnnnnnnnnnnnnnnnnnnnnnnnnnnnnnnnnnnnnnnnnnnnnnnnnnnnnnnnnnnnnnnnnnnnnnnnnnnnnnnnnnnnnnnnnnnnnnnnnnnnnnnnnnnnnnnnnnnnnnnnnnnnnnnnnnnnnnnnnnnnnnnnnnnnnnnnnnnnnnnnnnnnnnnnnnnnnnnnnnnnnnnnnnnnnnnnnnnnnnnnnnnnnnnnnnnnnnnnnnnnnnnnnnnnnnnnnnnnnnnnnnnnnnnnnnnnnnnnnnnnnnnnnnnnnnnnnnnnnnnnnnnnnnnnnnnnnnnnnnnnnnnnnnnnnnnnnnnnnnnnnnnnnnnnnnnnnnnnnnnnnnnnnnnnnnnnnnnnnnnnnnnnnnnnnnnnnnnnnnnnnnnnnnnnnnnnnnnnnnnnnnnnnnnnnnnnnnnnnnnnnnnnnnnnnnnnnnnnnnnnnnnnnnnnnnnnnnnnnnnnnnnnnnnnnnnnnnnnnnnnnnnnnnnnnnnnnnnnnnnnnnnnnnnnnnnnnnnnnnnnnnnnnnnnnnnnnnnnnnnnnnnnnnnnnnnnnnnnnnnnnnnnnnnnnnnnnnnnnnnnnnnnnnnnnnnnnnnnnnnnnnnnnnnnnnnnnnnnnnnnnnnnnnnnnnnnnnnnnnnnnnnnnnnnnnnnnnnnnnnnnnnnnnnnnnnnnnnnnnnnnnnnnnnnnnnnnnnnnnnnnnnnnnnnnnnnnnnnnnnnnnnnnnnnnnnnnnnnnnnnnnnnnnnnnnnnnnnnnnnnnnnnnnnnnnnnnnnnnnnnnnnnnnnnnnnnnnnnnnnnnnnnnnnnnnnnnnnnnnnnnnnnnnnnnnnnnnnnnnnnnnnnnnnnnnnnnnnnnnnnnnnnnnnnnnnnnnnnnnnnnnnnnnnnnnnnnnnnnnnnnnnnnnnnnnnnnnnnnnnnnnnnnnnnnnnnnnnnnnnnnnnnnnnnnnnnnnnnnnnnnnnnnnnnnnnnnnnnnnnnnnnnnnnnnnnnnnnnnnnnnnnnnnnnnnnnnnnnnnnnnnnnnnnnnnnnnnnnnnnnnnnnnnnnnnnnnnnnnnnnnnnnnnnnnnnnnnnnnnnnnnnnnnnnnnnnnnnnnnnnnnnnnnnnnnnnnnnnnnnnnnnnnnnnnnnnnnnnnnnnnnnnnnnnnnnnnnnnnnnnnnnnnnnnnnnnnnnnnnnnnnnnnnnnnnnnnnnnnnnnnnnnnnnnnnnnnnnnnnnnnnnnnnnnnnnnnnnnnnnnnnnnnnnnnnnnnnnnnnnnnnnnnnnnnnnnnnnnnnnnnnnnnnnnnnnnnnnnnnnnnnnnnnnnnnnnnnnnnnnnnnnnnnnnnnnnnnnnnnnnnnnnnnnnnnnnnnnnnnnnnnnnnnnnnnnnnnnnnnnnnnnnnnnnnnnnnnnnnnnnnnnnnnnnnnnnnnnnnnnnnnnnnnnnnnnnnnnnnnnnnnnnnnnnnnnnnnnnnnnnnnnnnnnnnnnnnnnnnnnnnnnnnnnnnnnnnnnnnnnnnnnnnnnnnnnnnnnnnnnnnnnnnnnnnnnnnnnnnnnnnnnnnnnnnnnnnnnnnnnnnnnnnnnnnnnnnnnnnnnnnnnnnnnnnnnnnnnnnnnnnnnnnnnnnnnnnnnnnnnnnnnnnnnnnnnnnnnnnnnnnnnnnnnnnnnnnnnnnnnnnnnnnnnnnnnnnnnnnnnnnnnnnnnnnnnnnnnnnnnnnnnnnnnnnnnnnnnnnnnnnnnnnnnnnnnnnnnnnnnnnnnnnnnnnnnnnnnnnnnnnnnnnnnnnnnnnnnnnnnnnnnnnnnnnnnnnnnnnnnnnnnnnnnnnnnnnnnnnnnnnnnnnnnnnnnnnnnnnnnnnnnnnnnnnnnnnnnnnnnnnnnnnnnnnnnnnnnnnnnnnnnnnnnnnnnnnnnnnnnnnnnnnnnnnnnnnnnnnnnnnnnnnnnnnnnnnnnnnnnnnnnnnnnnnnnnnnnnnnnnnnnnnnnnnnnnnnnnnnnnnnnnnnnnnnnnnnnnnnnnnnnnnnnnnnnnnnnnnnnnnnnnnnnnnnnnnnnnnnnnnnnnnnnnnnnnnnnnnnnnnnnnnnnnnnnnnnnnnnnnnnnnnnnnnnnnnnnnnnnnnnnnnnnnnnnnnnnnnnnnnnnnnnnnnnnnnnnnnnnnnnnnnnnnnnnnnnnnnnnnnnnnnnnnnnnnnnnnnnnnnnnnnnnnnnnnnnnnnnnnnnnnnnnnnnnnnnnnnnnnnnnnnnnnnnnnnnnnnnnnnnnnnnnnnnnnnnnnnnnnnnnnnnnnnnnnnnnnnnnnnnnnnnnnnnnnnnnnnnnnnnnnnnnnnnnnnnnnnnnnnnnnnnnnnnnnnnnnnnnnnnnnnnnnnnnnnnnnnnnnnnnnnnnnnnnnnnnnnnnnnnnnnnnnnnnnnnnnnnnnnnnnnnnnnnnnnnnnnnnnnnnnnnnnnnnnnnnnnnnnnnnnnnnnnnnnnnnnnnnnnnnnnnnnnnnnnnnnnnnnnnnnnnnnnnnnnnnnnnnnnnnnnnnnnnnnnnnnnnnnnnnnnnnnnnnnnnnnnnnnnnnnnnnnnnnnnnnnnnnnnnnnnnnnnnnnnnnnnnnnnnnnnnnnnnnnnnnnnnnnnnnnnnnnnnnnnnnnnnnnnnnnnnnnnnnnnnnnnnnnnnnnnnnnnnnnnnnnnnnnnnnnnnnnnnnnnnnnnnnnnnnnnnnnnnnnnnnnnnnnnnnnnnnnnnnnnnnnnnnnnnnnnnnnnnnnnnnnnnnnnnnnnnnnnnnnnnnnnnnnnnnnnnnnnnnnnnnnnnnnnnnnnnnnnnnnnnnnnnnnnnnnnnnnnnnnnnnnnnnnnnnnnnnnnnnnnnnnnnnnnnnnnnnnnnnnnnnnnnnnnnnnnnnnnnnnnnnnnnnnnnnnnnnnnnnnnnnnnnnnnnnnnnnnnnnnnnnnnnnnnnnnnnnnnnnnnnnnnnnnnnnnnnnnnnnnnnnnnnnnnnnnnnnnnnnnnnnnnnnnnnnnnnnnnnnnnnnnnnnnnnnnnnnnnnnnnnnnnnnnnnnnnnnnnnnnnnnnnnnnnnnnnnnnnnnnnnnnnnnnnnnnnnnnnnnnnnnnnnnnnnnnnnnnnnnnnnnnnnnnnnnnnnnnnnnnnnnnnnnnnnnnnnnnnnnnnnnnnnnnnnnnnnnnnnnnnnnnnnnnnnnnnnnnnnnnnnnnnnnnnnnnnnnnnnnnnnnnnnnnnnnnnnnnnnnnnnnnnnnnnnnnnnnnnnnnnnnnnnnnnnnnnnnnnnnnnnnnnnnnnnnnnnnnnnnnnnnnnnnnnnnnnnnnnnnnnnnnnnnnnnnnnnnnnnnnnnnnnnnnnnnnnnnnnnnnnnnnnnnnnnnnnnnnnnnnnnnnnnnnnnnnnnnnnnnnnnnnnnnnnnnnnnnnnnnnnnnnnnnnnnnnnnnnnnnnnnnnnnnnnnnnnnnnnnnnnnnnnnnnnnnnnnnnnnnnnnnnnnnnnnnnnnnnnnnnnnnnnnnnnnnnnnnnnnnnnnnnnnnnnnnnnnnnnnnnnnnnnnnnnnnnnnnnnnnnnnnnnnnnnnnnnnnnnnnnnnnnnnnnnnnnnnnnnnnnnnnnnnnnnnnnnnnnnnnnnnnnnnnnnnnnnnnnnnnnnnnnnnnnnnnnnnnnnnnnnnnnnnnnnnnnnnnnnnnnnnnnnnnnnnnnnnnnnnnnnnnnnnnnnnnnnnnnnnnnnnnnnnnnnnnnnnnnnnnnnnnnnnnnnnnnnnnnnnnnnnnnnnnnnnnnnnnnnnnnnnnnnnnnnnnnnnnnnnnnnnnnnnnnnnnnnnnnnnnnnnnnnnnnnnnnnnnnnnnnnnnnnnnnnnnnnnnnnnnnnnnnnnnnnnnnnnnnnnnnnnnnnnnnnnnnnnnnnnnnnnnnnnnnnnnnnnnnnnnnnnnnnnnnnnnnnnnnnnnnnnnnnnnnnnnnnnnnnnnnnnnnnnnnnnnnnnnnnnnnnnnnnnnnnnnnnnnnnnnnnnnnnnnnnnnnnnnnnnnnnnnnnnnnnnnnnnnnnnnnnnnnnnnnnnnnnnnnnnnnnnnnnnnnnnnnnnnnnnnnnnnnnnnnnnnnnnnnnnnnnnnnnnnnnnnnnnnnnnnnnnnnnnnnnnnnnnnnnnnnnnnnnnnnnnnnnnnnnnnnnnnnnnnnnnnnnnnnnnnnnnnnnnnnnnnnnnnnnnnnnnnnnnnnnnnnnnnnnnnnnnnnnnnnnnnnnnnnnnnnnnnnnnnnnnnnnnnnnnnnnnnnnnnnnnnnnnnnnnnnnnnnnnnnnnnnnnnnnnnnnnnnnnnnnnnnnnnnnnnnnnnnnnnnnnnnnnnnnnnnnnnnnnnnnnnnnnnnnnnnnnnnnnnnnnnnnnnnnnnnnnnnnnnnnnnnnnnnnnnnnnnnnnnnnnnnnnnnnnnnnnnnnnnnnnnnnnnnnnnnnnnnnnnnnnnnnnnnnnnnnnnnnnnnnnnnnnnnnnnnnnnnnnnnnnnnnnnnnnnnnnnnnnnnnnnnnnnnnnnnnnnnnnnnnnnnnnnnnnnnnnnnnnnnnnnnnnnnnnnnnnnnnnnnnnnnnnnnnnnnnnnnnnnnnnnnnnnnnnnnnnnnnnnnnnnnnnnnnnnnnnnnnnnnnnnnnnnnnnnnnnnnnnnnnnnnnnnnnnnnnnnnnnnnnnnnnnnnnnnnnnnnnnnnnnnnnnnnnnnnnnnnnnnnnnnnnnnnnnnnnnnnnnnnnnnnnnnnnnnnnnnnnnnnnnnnnnnnnnnnnnnnnnnnnnnnnnnnnnnnnnnnnnnnnnnnnnnnnnnnnnnnnnnnnnnnnnnnnnnnnnnnnnnnnnnnnnnnnnnnnnnnnnnnnnnnnnnnnnnnnnnnnnnnnnnnnnnnnnnnnnnnnnnnnnnnnnnnnnnnnnnnnnnnnnnnnnnnnnnnnnnnnnnnnnnnnnnnnnnnnnnnnnnnnnnnnnnnnnnnnnnnnnnnnnnnnnnnnnnnnnnnnnnnnnnnnnnnnnnnnnnnnnnnnnnnnnnnnnnnnnnnnnnnnnnnnnnnnnnnnnnnnnnnnnnnnnnnnnnnnnnnnnnnnnnnnnnnnnnnnnnnnnnnnnnnnnnnnnnnnnnnnnnnnnnnnnnnnnnnnnnnnnnnnnnnnnnnnnnnnnnnnnnnnnnnnnnnnnnnnnnnnnnnnnnnnnnnnnnnnnnnnnnnnnnnnnnnnnnnnnnnnnnnnnnnnnnnnnnnnnnnnnnnnnnnnnnnnnnnnnnnnnnnnnnnnnnnnnnnnnnnnnnnnnnnnnnnnnnnnnnnnnnnnnnnnnnnnnnnnnnnnnnnnnnnnnnnnnnnnnnnnnnnnnnnnnnnnnnnnnnnnnnnnnnnnnnnnnnnnnnnnnnnnnnnnnnnnnnnnnnnnnnnnnnnnnnnnnnnnnnnnnnnnnnnnnnnnnnnnnnnnnnnnnnnnnnnnnnnnnnnnnnnnnnnnnnnnnnnnnnnnnnnnnnnnnnnnnnnnnnnnnnnnnnnnnnnnnnnnnnnnnnnnnnnnnnnnnnnnnnnnnnnnnnnnnnnnnnnnnnnnnnnnnnnnnnnnnnnnnnnnnnnnnnnnnnnnnnnnnnnnnnnnnnnnnnnnnnnnnnnnnnnnnnnnnnnnnnnnnnnnnnnnnnnnnnnnnnnnnnnnnnnnnnnnnnnnnnnnnnnnnnnnnnnnnnnnnnnnnnnnnnnnnnnnnnnnnnnnnnnnnnnnnnnnnnnnnnnnnnnnnnnnnnnnnnnnnnnnnnnnnnnnnnnnnnnnnnnnnnnnnnnnnnnnnnnnnnnnnnnnnnnnnnnnnnnnnnnnnnnnnnnnnnnnnnnnnnnnnnnnnnnnnnnnnnnnnnnnnnnnnnnnnnnnnnnnnnnnnnnnnnnnnnnnnnnnnnnnnnnnnnnnnnnnnnnnnnnnnnnnnnnnnnnnnnnnnnnnnnnnnnnnnnnnnnnnnnnnnnnnnnnnnnnnnnnnnnnnnnnnnnnnnnnnnnnnnnnnnnnnnnnnnnnnnnnnnnnnnnnnnnnnnnnnnnnnnnnnnnnnnnnnnnnnnnnnnnnnnnnnnnnnnnnnnnnnnnnnnnnnnnnnnnnnnnnnnnnnnnnnnnnnnnnnnnnnnnnnnnnnnnnnnnnnnnnnnnnnnnnnnnnnnnnnnnnnnnnnnnnnnnnnnnnnnnnnnnnnnnnnnnnnnnnnnnnnnnnnnnnnnnnnnnnnnnnnnnnnnnnnnnnnnnnnnnnnnnnnnnnnnnnnnnnnnnnnnnnnnnnnnnnnnnnnnnnnnnnnnnnnnnnnnnnnnnnnnnnnnnnnnnnnnnnnnnnnnnnnnnnnnnnnnnnnnnnnnnnnnnnnnnnnnnnnnnnnnnnnnnnnnnnnnnnnnnnnnnnnnnnnnnnnnnnnnnnnnnnnnnnnnnnnnnnnnnnnnnnnnnnnnnnnnnnnnnnnnnnnnnnnnnnnnnnnnnnnnnnnnnnnnnnnnnnnnnnnnnnnnnnnnnnnnnnnnnnnnnnnnnnnnnnnnnnnnnnnnnnnnnnnnnnnnnnnnnnnnnnnnnnnnnnnnnnnnnnnnnnnnnnnnnnnnnnnnnnnnnnnnnnnnnnnnnnnnnnnnnnnnnnnnnnnnnnnnnnnnnnnnnnnnnnnnnnnnnnnnnnnnnnnnnnnnnnnnnnnnnnnnnnnnnnnnnnnnnnnnnnnnnnnnnnnnnnnnnnnnnnnnnnnnnnnnnnnnnnnnnnnnnnnnnnnnnnnnnnnnnnnnnnnnnnnnnnnnnnnnnnnnnnnnnnnnnnnnnnnnnnnnnnnnnnnnnnnnnnnnnnnnnnnnnnnnnnnnnnnnnnnnnnnnnnnnnnnnnnnnnnnnnnnnnnnnnnnnnnnnnnnnnnnnnnnnnnnnnnnnnnnnnnnnnnnnnnnnnnnnnnnnnnnnnnnnnnnnnnnnnnnnnnnnnnnnnnnnnnnnnnnnnnnnnnnnnnnnnnnnnnnnnnnnnnnnnnnnnnnnnnnnnnnnnnnnnnnnnnnnnnnnnnnnnnnnnnnnnnnnnnnnnnnnnnnnnnnnnnnnnnnnnnnnnnnnnnnnnnnnnnnnnnnnnnnnnnnnnnnnnnnnnnnnnnnnnnnnnnnnnnnnnnnnnnnnnnnnnnnnnnnnnnnnnnnnnnnnnnnnnnnnnnnnnnnnnnnnnnnnnnnnnnnnnnnnnnnnnnnnnnnnnnnnnnnnnnnnnnnnnnnnnnnnnnnnnnnnnnnnnnnnnnnnnnnnnnnnnnnnnnnnnnnnnnnnnnnnnnnnnnnnnnnnnnnnnnnnnnnnnnnnnnnnnnnnnnnnnnnnnnnnnnnnnnnnnnnnnnnnnnnnnnnnnnnnnnnnnnnnnnnnnnnnnnnnnnnnnnnnnnnnnnnnnnnnnnnnnnnnnnnnnnnnnnnnnnnnnnnnnnnnnnnnnnnnnnnnnnnnnnnnnnnnnnnnnnnnnnnnnnnnnnnnnnnnnnnnnnnnnnnnnnnnnnnnnnnnnnnnnnnnnnnnnnnnnnnnnnnnnnnnnnnnnnnnnnnnnnnnnnnnnnnnnnnnnnnnnnnnnnnnnnnnnnnnnnnnnnnnnnnnnnnnnnnnnnnnnnnnnnnnnnnnnnnnnnnnnnnnnnnnnnnnnnnnnnnnnnnnnnnnnnnnnnnnnnnnnnnnnnnnnnnnnnnnnnnnnnnnnnnnnnnnnnnnnnnnnnnnnnnnnnnnnnnnnnnnnnnnnnnnnnnnnnnnnnnnnnnnnnnnnnnnnnnnnnnnnnnnnnnnnnnnnnnnnnnnnnnnnnnnnnnnnnnnnnnnnnnnnnnnnnnnnnnnnnnnnnnnnnnnnnnnnnnnnnnnnnnnnnnnnnnnnnnnnnnnnnnnnnnnnnnnnnnnnnnnnnnnnnnnnnnnnnnnnnnnnnnnnnnnnnnnnnnnnnnnnnnnnnnnnnnnnnnnnnnnnnnnnnnnnnnnnnnnnnnnnnnnnnnnnnnnnnnnnnnnnnnnnnnnnnnnnnnnnnnnnnnnnnnnnnnnnnnnnnnnnnnnnnnnnnnnnnnnnnnnnnnnnnnnnnnnnnnnnnnnnnnnnnnnnnnnnnnnnnnnnnnnnnnnnnnnnnnnnnnnnnnnnnnnnnnnnnnnnnnnnnnnnnnnnnnnnnnnnnnnnnnnnnnnnnnnnnnnnnnnnnnnnnnnnnnnnnnnnnnnnnnnnnnnnnnnnnnnnnnnnnnnnnnnnnnnnnnnnnnnnnnnnnnnnnnnnnnnnnnnnnnnnnnnnnnnnnnnnnnnnnnnnnnnnnnnnnnnnnnnnnnnnnnnnnnnnnnnnnnnnnnnnnnnnnnnnnnnnnnnnnnnnnnnnnnnnnnnnnnnnnnnnnnnnnnnnnnnnnnnnnnnnnnnnnnnnnnnnnnnnnnnnnnnnnnnnnnnnnnnnnnnnnnnnnnnnnnnnnnnnnnnnnnnnnnnnnnnnnnnnnnnnnnnnnnnnnnnnnnnnnnnnnnnnnnnnnnnnnnnnnnnnnnnnnnnnnnnnnnnnnnnnnnnnnnnnnnnnnnnnnnnnnnnnnnnnnnnnnnnnnnnnnnnnnnnnnnnnnnnnnnnnnnnnnnnnnnnnnnnnnnnnnnnnnnnnnnnnnnnnnnnnnnnnnnnnnnnnnnnnnnnnnnnnnnnnnnnnnnnnnnnnnnnnnnnnnnnnnnnnnnnnnnnnnnnnnnnnnnnnnnnnnnnnnnnnnnnnnnnnnnnnnnnnnnnnnnnnnnnnnnnnnnnnnnnnnnnnnnnnnnnnnnnnnnnnnnnnnnnnnnnnnnnnnnnnnnnnnnnnnnnnnnnnnnnnnnnnnnnnnnnnnnnnnnnnnnnnnnnnnnnnnnnnnnnnnnnnnnnnnnnnnnnnnnnnnnnnnnnnnnnnnnnnnnnnnnnnnnnnnnnnnnnnnnnnnnnnnnnnnnnnnnnnnnnnnnnnnnnnnnnnnnnnnnnnnnnnnnnnnnnnnnnnnnnnnnnnnnnnnnnnnnnnnnnnnnnnnnnnnnnnnnnnnnnnnnnnnnnnnnnnnnnnnnnnnnnnnnnnnnnnnnnnnnnnnnnnnnnnnnnnnnnnnnnnnnnnnnnnnnnnnnnnnnnnnnnnnnnnnnnnnnnnnnnnnnnnnnnnnnnnnnnnnnnnnnnnnnnnnnnnnnnnnnnnnnnnnnnnnnnnnnnnnnnnnnnnnnnnnnnnnnnnnnnnnnnnnnnnnnnnnnnnnnnnnnnnnnnnnnnnnnnnnnnnnnnnnnnnnnnnnnnnnnnnnnnnnnnnnnnnnnnnnnnnnnnnnnnnnnnnnnnnnnnnnnnnnnnnnnnnnnnnnnnnnnnnnnnnnnnnnnnnnnnnnnnnnnnnnnnnnnnnnnnnnnnnnnnnnnnnnnnnnnnnnnnnnnnnnnnnnnnnnnnnnnnnnnnnnnnnnnnnnnnnnnnnnnnnnnnnnnnnnnnnnnnnnnnnnnnnnnnnnnnnnnnnnnnnnnnnnnnnnnnnnnnnnnnnnnnnnnnnnnnnnnnnnnnnnnnnnnnnnnnnnnnnnnnnnnnnnnnnnnnnnnnnnnnnnnnnnnnnnnnnnnnnnnnnnnnnnnnnnnnnnnnnnnnnnnnnnnnnnnnnnnnnnnnnnnnnnnnnnnnnnnnnnnnnnnnnnnnnnnnnnnnnnnnnnnnnnnnnnnnnnnnnnnnnnnnnnnnnnnnnnnnnnnnnnnnnnnnnnnnnnnnnnnnnnnnnnnnnnnnnnnnnnnnnnnnnnnnnnnnnnnnnnnnnnnnnnnnnnnnnnnnnnnnnnnnnnnnnnnnnnnnnnnnnnnnnnnnnnnnnnnnnnnnnnnnnnnnnnnnnnnnnnnnnnnnnnnnnnnnnnnnnnnnnnnnnnnnnnnnnnnnnnnnnnnnnnnnnnnnnnnnnnnnnnnnnnnnnnnnnnnnnnnnnnnnnnnnnnnnnnnnnnnnnnnnnnnnnnnnnnnnnnnnnnnnnnnnnnnnnnnnnnnnnnnnnnnnnnnnnnnnnnnnnnnnnnnnnnnnnnnnnnnnnnnnnnnnnnnnnnnnnnnnnnnnnnnnnnnnnnnnnnnnnnnnnnnnnnnnnnnnnnnnnnnnnnnnnnnnnnnnnnnnnnnnnnnnnnnnnnnnnnnnnnnnnnnnnnnnnnnnnnnnnnnnnnnnnnnnnnnnnnnnnnnnnnnnnnnnnnnnnnnnnnnnnnnnnnnnnnnnnnnnnnnnnnnnnnnnnnnnnnnnnnnnnnnnnnnnnnnnnnnnnnnnnnnnnnnnnnnnnnnnnnnnnnnnnnnnnnnnnnnnnnnnnnnnnnnnnnnnnnnnnnnnnnnnnnnnnnnnnnnnnnnnnnnnnnnnnnnnnnnnnnnnnnnnnnnnnnnnnnnnnnnnnnnnnnnnnnnnnnnnnnnnnnnnnnnnnnnnnnnnnnnnnnnnnnnnnnnnnnnnnnnnnnnnnnnnnnnnnnnnnnnnnnnnnnnnnnnnnnnnnnnnnnnnnnnnnnnnnnnnnnnnnnnnnnnnnnnnnnnnnnnnnnnnnnnnnnnnnnnnnnnnnnnnnnnnnnnnnnnnnnnnnnnnnnnnnnnnnnnnnnnnnnnnnnnnnnnnnnnnnnnnnnnnnnnnnnnnnnnnnnnnnnnnnnnnnnnnnnnnnnnnnnnnnnnnnnnnnnnnnnnnnnnnnnnnnnnnnnnnnnnnnnnnnnnnnnnnnnnnnnnnnnnnnnnnnnnnnnnnnnnnnnnnnnnnnnnnnnnnnnnnnnnnnnnnnnnnnnnnnnnnnnnnnnnnnnnnnnnnnnnnnnnnnnnnnnnnnnnnnnnnnnnnnnnnnnnnnnnnnnnnnnnnnnnnnnnnnnnnnnnnnnnnnnnnnnnnnnnnnnnnnnnnnnnnnnnnnnnnnnnnnnnnnnnnnnnnnnnnnnnnnnnnnnnnnnnnnnnnnnnnnnnnnnnnnnnnnnnnnnnnnnnnnnnnnnnnnnnnnnnnnnnnnnnnnnnnnnnnnnnnnnnnnnnnnnnnnnnnnnnnnnnnnnnnnnnnnnnnnnnnnnnnnnnnnnnnnnnnnnnnnnnnnnnnnnnnnnnnnnnnnnnnnnnnnnnnnnnnnnnnnnnnnnnnnnnnnnnnnnnnnnnnnnnnnnnnnnnnnnnnnnnnnnnnnnnnnnnnnnnnnnnnnnnnnnnnnnnnnnnnnnnnnnnnnnnnnnnnnnnnnnnnnnnnnnnnnnnnnnnnnnnnnnnnnnnnnnnnnnnnnnnnnnnnnnnnnnnnnnnnnnnnnnnnnnnnnnnnnnnnnnnnnnnnnnnnnnnnnnnnnnnnnnnnnnnnnnnnnnnnnnnnnnnnnnnnnnnnnnnnnnnnnnnnnnnnnnnnnnnnnnnnnnnnnnnnnnnnnnnnnnnnnnnnnnnnnnnnnnnnnnnnnnnnnnnnnnnnnnnnnnnnnnnnnnnnnnnnnnnnnnnnnnnnnnnnnnnnnnnnnnnnnnnnnnnnnnnnnnnnnnnnnnnnnnnnnnnnnnnnnnnnnnnnnnnnnnnnnnnnnnnnnnnnnnnnnnnnnnnnnnnnnnnnnnnnnnnnnnnnnnnnnnnnnnnnnnnnnnnnnnnnnnnnnnnnnnnnnnnnnnnnnnnnnnnnnnnnnnnnnnnnnnnnnnnnnnnnnnnnnnnnnnnnnnnnnnnnnnnnnnnnnnnnnnnnnnnnnnnnnnnnnnnnnnnnnnnnnnnnnnnnnnnnnnnnnnnnnnnnnnnnnnnnnnnnnnnnnnnnnnnnnnnnnnnnnnnnnnnnnnnnnnnnnnnnnnnnnnnnnnnnnnnnnnnnnnnnnnnnnnnnnnnnnnnnnnnnnnnnnnnnnnnnnnnnnnnnnnnnnnnnnnnnnnnnnnnnnnnnnnnnnnnnnnnnnnnnnnnnnnnnnnnnnnnnnnnnnnnnnnnnnnnnnnnnnnnnnnnnnnnnnnnnnnnnnnnnnnnnnnnnnnnnnnnnnnnnnnnnnnnnnnnnnnnnnnnnnnnnnnnnnnnnnnnnnnnnnnnnnnnnnnnnnnnnnnnnnnnnnnnnnnnnnnnnnnnnnnnnnnnnnnnnnnnnnnnnnnnnnnnnnnnnnnnnnnnnnnnnnnnnnnnnnnnnnnnnnnnnnnnnnnnnnnnnnnnnnnnnnnnnnnnnnnnnnnnnnnnnnnnnnnnnnnnnnnnnnnnnnnnnnnnnnnnnnnnnnnnnnnnnnnnnnnnnnnnnnnnnnnnnnnnnnnnnnnnnnnnnnnnnnnnnnnnnnnnnnnnnnnnnnnnnnnnnnnnnnnnnnnnnnnnnnnnnnnnnnnnnnnnnnnnnnnnnnnnnnnnnnnnnnnnnnnnnnnnnnnnnnnnnnnnnnnnnnnnnnnnnnnnnnnnnnnnnnnnnnnnnnnnnnnnnnnnnnnnnnnnnnnnnnnnnnnnnnnnnnnnnnnnnnnnnnnnnnnnnnnnnnnnnnnnnnnnnnnnnnnnnnnnnnnnnnnnnnnnnnnnnnnnnnnnnnnnnnnnnnnnnnnnnnnnnnnnnnnnnnnnnnnnnnnnnnnnnnnnnnnnnnnnnnnnnnnnnnnnnnnnnnnnnnnnnnnnnnnnnnnnnnnnnnnnnnnnnnnnnnnnnnnnnnnnnnnnnnnnnnnnnnnnnnnnnnnnnnnnnnnnnnnnnnnnnnnnnnnnnnnnnnnnnnnnnnnnnnnnnnnnnnnnnnnnnnnnnnnnnnnnnnnnnnnnnnnnnnnnnnnnnnnnnnnnnnnnnnnnnnnnnnnnnnnnnnnnnnnnnnnnnnnnnnnnnnnnnnnnnnnnnnnnnnnnnnnnnnnnnnnnnnnnnnnnnnnnnnnnnnnnnnnnnnnnnnnnnnnnnnnnnnnnnnnnnnnnnnnnnnnnnnnnnnnnnnnnnnnnnnnnnnnnnnnnnnnnnnnnnnnnnnnnnnnnnnnnnnnnnnnnnnnnnnnnnnnnnnnnnnnnnnnnnnnnnnnnnnnnnnnnnnnnnnnnnnnnnnnnnnnnnnnnnnnnnnnnnnnnnnnnnnnnnnnnnnnnnnnnnnnnnnnnnnnnnnnnnnnnnnnnnnnnnnnnnnnnnnnnnnnnnnnnnnnnnnnnnnnnnnnnnnnnnnnnnnnnnnnnnnnnnnnnnnnnnnnnnnnnnnnnnnnnnnnnnnnnnnnnnnnnnnnnnnnnnnnnnnnnnnnnnnnnnnnnnnnnnnnnnnnnnnnnnnnnnnnnnnnnnnnnnnnnnnnnnnnnnnnnnnnnnnnnnnnnnnnnnnnnnnnnnnnnnnnnnnnnnnnnnnnnnnnnnnnnnnnnnnnnnnnnnnnnnnnnnnnnnnnnnnnnnnnnnnnnnnnnnnnnnnnnnnnnnnnnnnnnnnnnnnnnnnnnnnnnnnnnnnnnnnnnnnnnnnnnnnnnnnnnnnnnnnnnnnnnnnnnnnnnnnnnnnnnnnnnnnnnnnnnnnnnnnnnnnnnnnnnnnnnnnnnnnnnnnnnnnnnnnnnnnnnnnnnnnnnnnnnnnnnnnnnnnnnnnnnnnnnnnnnnnnnnnnnnnnnnnnnnnnnnnnnnnnnnnnnnnnnnnnnnnnnnnnnnnnnnnnnnnnnnnnnnnnnnnnnnnnnnnnnnnnnnnnnnnnnnnnnnnnnnnnnnnnnnnnnnnnnnnnnnnnnnnnnnnnnnnnnnnnnnnnnnnnnnnnnnnnnnnnnnnnnnnnnnnnnnnnnnnnnnnnnnnnnnnnnnnnnnnnnnnnnnnnnnnnnnnnnnnnnnnnnnnnnnnnnnnnnnnnnnnnnnnnnnnnnnnnnnnnnnnnnnnnnnnnnnnnnnnnnnnnnnnnnnnnnnnnnnnnnnnnnnnnnnnnnnnnnnnnnnnnnnnnnnnnnnnnnnnnnnnnnnnnnnnnnnnnnnnnnnnnnnnnnnnnnnnnnnnnnnnnnnnnnnnnnnnnnnnnnnnnnnnnnnnnnnnnnnnnnnnnnnnnnnnnnnnnnnnnnnnnnnnnnnnnnnnnnnnnnnnnnnnnnnnnnnnnnnnnnnnnnnnnnnnnnnnnnnnnnnnnnnnnnnnnnnnnnnnnnnnnnnnnnnnnnnnnnnnnnnnnnnnnnnnnnnnnnnnnnnnnnnnnnnnnnnnnnnnnnnnnnnnnnnnnnnnnnnnnnnnnnnnnnnnnnnnnnnnnnnnnnnnnnnnnnnnnnnnnnnnnnnnnnnnnnnnnnnnnnnnnnnnnnnnnnnnnnnnnnnnnnnnnnnnnnnnnnnnnnnnnnnnnnnnnnnnnnnnnnnnnnnnnnnnnnnnnnnnnnnnnnnnnnnnnnnnnnnnnnnnnnnnnnnnnnnnnnnnnnnnnnnnnnnnnnnnnnnnnnnnnnnnnnnnnnnnnnnnnnnnnnnnnnnnnnnnnnnnnnnnnnnnnnnnnnnnnnnnnnnnnnnnnnnnnnnnnnnnnnnnnnnnnnnnnnnnnnnnnnnnnnnnnnnnnnnnnnnnnnnnnnnnnnnnnnnnnnnnnnnnnnnnnnnnnnnnnnnnnnnnnnnnnnnnnnnnnnnnnnnnnnnnnnnnnnnnnnnnnnnnnnnnnnnnnnnnnnnnnnnnnnnnnnnnnnnnnnnnnnnnnnnnnnnnnnnnnnnnnnnnnnnnnnnnnnnnnnnnnnnnnnnnnnnnnnnnnnnnnnnnnnnnnnnnnnnnnnnnnnnnnnnnnnnnnnnnnnnnnnnnnnnnnnnnnnnnnnnnnnnnnnnnnnnnnnnnnnnnnnnnnnnnnnnnnnnnnnnnnnnnnnnnnnnnnnnnnnnnnnnnnnnnnnnnnnnnnnnnnnnnnnnnnnnnnnnnnnnnnnnnnnnnnnnnnnnnnnnnnnnnnnnnnnnnnnnnnnnnnnnnnnnnnnnnnnnnnnnnnnnnnnnnnnnnnnnnnnnnnnnnnnnnnnnnnnnnnnnnnnnnnnnnnnnnnnnnnnnnnnnnnnnnnnnnnnnnnnnnnnnnnnnnnnnnnnnnnnnnnnnnnnnnnnnnnnnnnnnnnnnnnnnnnnnnnnnnnnnnnnnnnnnnnnnnnnnnnnnnnnnnnnnnnnnnnnnnnnnnnnnnnnnnnnnnnnnnnnnnnnnnnnnnnnnnnnnnnnnnnnnnnnnnnnnnnnnnnnnnnnnnnnnnnnnnnnnnnnnnnnnnnnnnnnnnnnnnnnnnnnnnnnnnnnnnnnnnnnnnnnnnnnnnnnnnnnnnnnnnnnnnnnnnnnnnnnnnnnnnnnnnnnnnnnnnnnnnnnnnnnnnnnnnnnnnnnnnnnnnnnnnnnnnnnnnnnnnnnnnnnnnnnnnnnnnnnnnnnnnnnnnnnnnnnnnnnnnnnnnnnnnnnnnnnnnnnnnnnnnnnnnnnnnnnnnnnnnnnnnnnnnnnnnnnnnnnnnnnnnnnnnnnnnnnnnnnnnnnnnnnnnnnnnnnnnnnnnnnnnnnnnnnnnnnnnnnnnnnnnnnnnnnnnnnnnnnnnnnnnnnnnnnnnnnnnnnnnnnnnnnnnnnnnnnnnnnnnnnnnnnnnnnnnnnnnnnnnnnnnnnnnnnnnnnnnnnnnnnnnnnnnnnnnnnnnnnnnnnnnnnnnnnnnnnnnnnnnnnnnnnnnnnnnnnnnnnnnnnnnnnnnnnnnnnnnnnnnnnnnnnnnnnnnnnnnnnnnnnnnnnnnnnnnnnnnnnnnnnnnnnnnnnnnnnnnnnnnnnnnnnnnnnnnnnnnnnnnnnnnnnnnnnnnnnnnnnnnnnnnnnnnnnnnnnnnnnnnnnnnnnnnnnnnnnnnnnnnnnnnnnnnnnnnnnnnnnnnnnnnnnnnnnnnnnnnnnnnnnnnnnnnnnnnnnnnnnnnnnnnnnnnnnnnnnnnnnnnnnnnnnnnnnnnnnnnnnnnnnnnnnnnnnnnnnnnnnnnnnnnnnnnnnnnnnnnnnnnnnnnnnnnnnnnnnnnnnnnnnnnnnnnnnnnnnnnnnnnnnnnnnnnnnnnnnnnnnnnnnnnnnnnnnnnnnnnnnnnnnnnnnnnnnnnnnnnnnnnnnnnnnnnnnnnnnnnnnnnnnnnnnnnnnnnnnnnnnnnnnnnnnnnnnnnnnnnnnnnnnnnnnnnnnnnnnnnnnnnnnnnnnnnnnnnnnnnnnnnnnnnnnnnnnnnnnnnnnnnnnnnnnnnnnnnnnnnnnnnnnnnnnnnnnnnnnnnnnnnnnnnnnnnnnnnnnnnnnnnnnnnnnnnnnnnnnnnnnnnnnnnnnnnnnnnnnnnnnnnnnnnnnnnnnnnnnnnnnnnnnnnnnnnnnnnnnnnnnnnnnnnnnnnnnnnnnnnnnnnnnnnnnnnnnnnnnnnnnnnnnnnnnnnnnnnnnnnnnnnnnnnnnnnnnnnnnnnnnnnnnnnnnnnnnnnnnnnnnnnnnnnnnnnnnnnnnnnnnnnnnnnnnnnnnnnnnnnnnnnnnnnnnnnnnnnnnnnnnnnnnnnnnnnnnnnnnnnnnnnnnnnnnnnnnnnnnnnnnnnnnnnnnnnnnnnnnnnnnnnnnnnnnnnnnnnnnnnnnnnnnnnnnnnnnnnnnnnnnnnnnnnnnnnnnnnnnnnnnnnnnnnnnnnnnnnnnnnnnnnnnnnnnnnnnnnnnnnnnnnnnnnnnnnnnnnnnnnnnnnnnnnnnnnnnnnnnnnnnnnnnnnnnnnnnnnnnnnnnnnnnnnnnnnnnnnnnnnnnnnnnnnnnnnnnnnnnnnnnnnnnnnnnnnnnnnnnnnnnnnnnnnnnnnnnnnnnnnnnnnnnnnnnnnnnnnnnnnnnnnnnnnnnnnnnnnnnnnnnnnnnnnnnnnnnnnnnnnnnnnnnnnnnnnnnnnnnnnnnnnnnnnnnnnnnnnnnnnnnnnnnnnnnnnnnnnnnnnnnnnnnnnnnnnnnnnnnnnnnnnnnnnnnnnnnnnnnnnnnnnnnnnnnnnnnnnnnnnnnnnnnnnnnnnnnnnnnnnnnnnnnnnnnnnnnnnnnnnnnnnnnnnnnnnnnnnnnnnnnnnnnnnnnnnnnnnnnnnnnnnnnnnnnnnnnnnnnnnnnnnnnnnnnnnnnnnnnnnnnnnnnnnnnnnnnnnnnnnnnnnnnnnnnnnnnnnnnnnnnnnnnnnnnnnnnnnnnnnnnnnnnnnnnnnnnnnnnnnnnnnnnnnnnnnnnnnnnnnnnnnnnnnnnnnnnnnnnnnnnnnnnnnnnnnnnnnnnnnnnnnnnnnnnnnnnnnnnnnnnnnnnnnnnnnnnnnnnnnnnnnnnnnnnnnnnnnnnnnnnnnnnnnnnnnnnnnnnnnnnnnnnnnnnnnnnnnnnnnnnnnnnnnnnnnnnnnnnnnnnnnnnnnnnnnnnnnnnnnnnnnnnnnnnnnnnnnnnnnnnnnnnnnnnnnnnnnnnnnnnnnnnnnnnnnnnnnnnnnnnnnnnnnnnnnnnnnnnnnnnnnnnnnnnnnnnnnnnnnnnnnnnnnnnnnnnnnnnnnnnnnnnnnnnnnnnnnnnnnnnnnnnnnnnnnnnnnnnnnnnnnnnnnnnnnnnnnnnnnnnnnnnnnnnnnnnnnnnnnnnnnnnnnnnnnnnnnnnnnnnnnnnnnnnnnnnnnnnnnnnnnnnnnnnnnnnnnnnnnnnnnnnnnnnnnnnnnnnnnnnnnnnnnnnnnnnnnnnnnnnnnnnnnnnnnnnnnnnnnnnnnnnnnnnnnnnnnnnnnnnnnnnnnnnnnnnnnnnnnnnnnnnnnnnnnnnnnnnnnnnnnnnnnnnnnnnnnnnnnnnnnnnnnnnnnnnnnnnnnnnnnnnnnnnnnnnnnnnnnnnnnnnnnnnnnnnnnnnnnnnnnnnnnnnnnnnnnnnnnnnnnnnnnnnnnnnnnnnnnnnnnnnnnnnnnnnnnnnnnnnnnnnnnnnnnnnnnnnnnnnnnnnnnnnnnnnnnnnnnnnnnnnnnnnnnnnnnnnnnnnnnnnnnnnnnnnnnnnnnnnnnnnnnnnnnnnnnnnnnnnnnnnnnnnnnnnnnnnnnnnnnnnnnnnnnnnnnnnnnnnnnnnnnnnnnnnnnnnnnnnnnnnnnnnnnnnnnnnnnnnnnnnnnnnnnnnnnnnnnnnnnnnnnnnnnnnnnnnnnnnnnnnnnnnnnnnnnnnnnnnnnnnnnnnnnnnnnnnnnnnnnnnnnnnnnnnnnnnnnnnnnnnnnnnnnnnnnnnnnnnnnnnnnnnnnnnnnnnnnnnnnnnnnnnnnnnnnnnnnnnnnnnnnnnnnnnnnnnnnnnnnnnnnnnnnnnnnnnnnnnnnnnnnnnnnnnnnnnnnnnnnnnnnnnnnnnnnnnnnnnnnnnnnnnnnnnnnnnnnnnnnnnnnnnnnnnnnnnnnnnnnnnnnnnnnnnnnnnnnnnnnnnnnnnnnnnnnnnnnnnnnnnnnnnnnnnnnnnnnnnnnnnnnnnnnnnnnnnnnnnnnnnnnnnnnnnnnnnnnnnnnnnnnnnnnnnnnnnnnnnnnnnnnnnnnnnnnnnnnnnnnnnnnnnnnnnnnnnnnnnnnnnnnnnnnnnnnnnnnnnnnnnnnnnnnnnnnnnnnnnnnnnnnnnnnnnnnnnnnnnnnnnnnnnnnnnnnnnnnnnnnnnnnnnnnnnnnnnnnnnnnnnnnnnnnnnnnnnnnnnnnnnnnnnnnnnnnnnnnnnnnnnnnnnnnnnnnnnnnnnnnnnnnnnnnnnnnnnnnnnnnnnnnnnnnnnnnnnnnnnnnnnnnnnnnnnnnnnnnnnnnnnnnnnnnnnnnnnnnnnnnnnnnnnnnnnnnnnnnnnnnnnnnnnnnnnnnnnnnnnnnnnnnnnnnnnnnnnnnnnnnnnnnnnnnnnnnnnnnnnnnnnnnnnnnnnnnnnnnnnnnnnnnnnnnnnnnnnnnnnnnnnnnnnnnnnnnnnnnnnnnnnnnnnnnnnnnnnnnnnnnnnnnnnnnnnnnnnnnnnnnnnnnnnnnnnnnnnnnnnnnnnnnnnnnnnnnnnnnnnnnnnnnnnnnnnnnnnnnnnnnnnnnnnnnnnnnnnnnnnnnnnnnnnnnnnnnnnnnnnnnnnnnnnnnnnnnnnnnnnnnnnnnnnnnnnnnnnnnnnnnnnnnnnnnnnnnnnnnnnnnnnnnnnnnnnnnnnnnnnnnnnnnnnnnnnnnnnnnnnnnnnnnnnnnnnnnnnnnnnnnnnnnnnnnnnnnnnnnnnnnnnnnnnnnnnnnnnnnnnnnnnnnnnnnnnnnnnnnnnnnnnnnnnnnnnnnnnnnnnnnnnnnnnnnnnnnnnnnnnnnnnnnnnnnnnnnnnnnnnnnnnnnnnnnnnnnnnnnnnnnnnnnnnnnnnnnnnnnnnnnnnnnnnnnnnnnnnnnnnnnnnnnnnnnnnnnnnnnnnnnnnnnnnnnnnnnnnnnnnnnnnnnnnnnnnnnnnnnnnnnnnnnnnnnnnnnnnnnnnnnnnnnnnnnnnnnnnnnnnnnnnnnnnnnnnnnnnnnnnnnnnnnnnnnnnnnnnnnnnnnnnnnnnnnnnnnnnnnnnnnnnnnnnnnnnnnnnnnnnnnnnnnnnnnnnnnnnnnnnnnnnnnnnnnnnnnnnnnnnnnnnnnnnnnnnnnnnnnnnnnnnnnnnnnnnnnnnnnnnnnnnnnnnnnnnnnnnnnnnnnnnnnnnnnnnnnnnnnnnnnnnnnnnnnnnnnnnnnnnnnnnnnnnnnnnnnnnnnnnnnnnnnnnnnnnnnnnnnnnnnnnnnnnnnnnnnnnnnnnnnnnnnnnnnnnnnnnnnnnnnnnnnnnnnnnnnnnnnnnnnnnnnnnnnnnnnnnnnnnnnnnnnnnnnnnnnnnnnnnnnnnnnnnnnnnnnnnnnnnnnnnnnnnnnnnnnnnnnnnnnnnnnnnnnnnnnnnnnnnnnnnnnnnnnnnnnnnnnnnnnnnnnnnnnnnnnnnnnnnnnnnnnnnnnnnnnnnnnnnnnnnnnnnnnnnnnnnnnnnnnnnnnnnnnnnnnnnnnnnnnnnnnnnnnnnnnnnnnnnnnnnnnnnnnnnnnnnnnnnnnnnnnnnnnnnnnnnnnnnnnnnnnnnnnnnnnnnnnnnnnnnnnnnnnnnnnnnnnnnnnnnnnnnnnnnnnnnnnnnnnnnnnnnnnnnnnnnnnnnnnnnnnnnnnnnnnnnnnnnnnnnnnnnnnnnnnnnnnnnnnnnnnnnnnnnnnnnnnnnnnnnnnnnnnnnnnnnnnnnnnnnnnnnnnnnnnnnnnnnnnnnnnnnnnnnnnnnnnnnnnnnnnnnnnnnnnnnnnnnnnnnnnnnnnnnnnnnnnnnnnnnnnnnnnnnnnnnnnnnnnnnnnnnnnnnnnnnnnnnnnnnnnnnnnnnnnnnnnnnnnnnnnnnnnnnnnnnnnnnnnnnnnnnnnnnnnnnnnnnnnnnnnnnnnnnnnnnnnnnnnnnnnnnnnnnnnnnnnnnnnnnnnnnnnnnnnnnnnnnnnnnnnnnnnnnnnnnnnnnnnnnnnnnnnnnnnnnnnnnnnnnnnnnnnnnnnnnnnnnnnnnnnnnnnnnnnnnnnnnnnnnnnnnnnnnnnnnnnnnnnnnnnnnnnnnnnnnnnnnnnnnnnnnnnnnnnnnnnnnnnnnnnnnnnnnnnnnnnnnnnnnnnnnnnnnnnnnnnnnnnnnnnnnnnnnnnnnnnnnnnnnnnnnnnnnnnnnnnnnnnnnnnnnnnnnnnnnnnnnnnnnnnnnnnnnnnnnnnnnnnnnnnnnnnnnnnnnnnnnnnnnnnnnnnnnnnnnnnnnnnnnnnnnnnnnnnnnnnnnnnnnnnnnnnnnnnnnnnnnnnnnnnnnnnnnnnnnnnnnnnnnnnnnnnnnnnnnnnnnnnnnnnnnnnnnnnnnnnnnnnnnnnnnnnnnnnnnnnnnnnnnnnnnnnnnnnnnnnnnnnnnnnnnnnnnnnnnnnnnnnnnnnnnnnnnnnnnnnnnnnnnnnnnnnnnnnnnnnnnnnnnnnnnnnnnnnnnnnnnnnnnnnnnnnnnnnnnnnnnnnnnnnnnnnnnnnnnnnnnnnnnnnnnnnnnnnnnnnnnnnnnnnnnnnnnnnnnnnnnnnnnnnnnnnnnnnnnnnnnnnnnnnnnnnnnnnnnnnnnnnnnnnnnnnnnnnnnnnnnnnnnnnnnnnnnnnnnnnnnnnnnnnnnnnnnnnnnnnnnnnnnnnnnnnnnnnnnnnnnnnnnnnnnnnnnnnnnnnnnnnnnnnnnnnnnnnnnnnnnnnnnnnnnnnnnnnnnnnnnnnnnnnnnnnnnnnnnnnnnnnnnnnnnnnnnnnnnnnnnnnnnnnnnnnnnnnnnnnnnnnnnnnnnnnnnnnnnnnnnnnnnnnnnnnnnnnnnnnnnnnnnnnnnnnnnnnnnnnnnnnnnnnnnnnnnnnnnnnnnnnnnnnnnnnnnnnnnnnnnnnnnnnnnnnnnnnnnnnnnnnnnnnnnnnnnnnnnnnnnnnnnnnnnnnnnnnnnnnnnnnnnnnnnnnnnnnnnnnnnnnnnnnnnnnnnnnnnnnnnnnnnnnnnnnnnnnnnnnnnnnnnnnnnnnnnnnnnnnnnnnnnnnnnnnnnnnnnnnnnnnnnnnnnnnnnnnnnnnnnnnnnnnnnnnnnnnnnnnnnnnnnnnnnnnnnnnnnnnnnnnnnnnnnnnnnnnnnnnnnnnnnnnnnnnnnnnnnnnnnnnnnnnnnnnnnnnnnnnnnnnnnnnnnnnnnnnnnnnnnnnnnnnnnnnnnnnnnnnnnnnnnnnnnnnnnnnnnnnnnnnnnnnnnnnnnnnnnnnnnnnnnnnnnnnnnnnnnnnnnnnnnnnnnnnnnnnnnnnnnnnnnnnnnnnnnnnnnnnnnnnnnnnnnnnnnnnnnnnnnnnnnnnnnnnnnnnnnnnnnnnnnnnnnnnnnnnnnnnnnnnnnnnnnnnnnnnnnnnnnnnnnnnnnnnnnnnnnnnnnnnnnnnnnnnnnnnnnnnnnnnnnnnnnnnnnnnnnnnnnnnnnnnnnnnnnnnnnnnnnnnnnnnnnnnnnnnnnnnnnnnnnnnnnnnnnnnnnnnnnnnnnnnnnnnnnnnnnnnnnnnnnnnnnnnnnnnnnnnnnnnnnnnnnnnnnnnnnnnnnnnnnnnnnnnnnnnnnnnnnnnnnnnnnnnnnnnnnnnnnnnnnnnnnnnnnnnnnnnnnnnnnnnnnnnnnnnnnnnnnnnnnnnnnnnnnnnnnnnnnnnnnnnnnnnnnnnnnnnnnnnnnnnnnnnnnnnnnnnnnnnnnnnnnnnnnnnnnnnnnnnnnnnnnnnnnnnnnnnnnnnnnnnnnnnnnnnnnnnnnnnnnnnnnnnnnnnnnnnnnnnnnnnnnnnnnnnnnnnnnnnnnnnnnnnnnnnnnnnnnnnnnnnnnnnnnnnnnnnnnnnnnnnnnnnnnnnnnnnnnnnnnnnnnnnnnnnnnnnnnnnnnnnnnnnnnnnnnnnnnnnnnnnnnnnnnnnnnnnnnnnnnnnnnnnnnnnnnnnnnnnnnnnnnnnnnnnnnnnnnnnnnnnnnnnnnnnnnnnnnnnnnnnnnnnnnnnnnnnnnnnnnnnnnnnnnnnnnnnnnnnnnnnnnnnnnnnnnnnnnnnnnnnnnnnnnnnnnnnnnnnnnnnnnnnnnnnnnnnnnnnnnnnnnnnnnnnnnnnnnnnnnnnnnnnnnnnnnnnnnnnnnnnnnnnnnnnnnnnnnnnnnnnnnnnnnnnnnnnnnnnnnnnnnnnnnnnnnnnnnnnnnnnnnnnnnnnnnnnnnnnnnnnnnnnnnnnnnnnnnnnnnnnnnnnnnnnnnnnnnnnnnnnnnnnnnnnnnnnnnnnnnnnnnnnnnnnnnnnnnnnnnnnnnnnnnnnnnnnnnnnnnnnnnnnnnnnnnnnnnnnnnnnnnnnnnnnnnnnnnnnnnnnnnnnnnnnnnnnnnnnnnnnnnnnnnnnnnnnnnnnnnnnnnnnnnnnnnnnnnnnnnnnnnnnnnnnnnnnnnnnnnnnnnnnnnnnnnnnnnnnnnnnnnnnnnnnnnnnnnnnnnnnnnnnnnnnnnnnnnnnnnnnnnnnnnnnnnnnnnnnnnnnnnnnnnnnnnnnnnnnnnnnnnnnnnnnnnnnnnnnnnnnnnnnnnnnnnnnnnnnnnnnnnnnnnnnnnnnnnnnnnnnnnnnnnnnnnnnnnnnnnnnnnnnnnnnnnnnnnnnnnnnnnnnnnnnnnnnnnnnnnnnnnnnnnnnnnnnnnnnnnnnnnnnnnnnnnnnnnnnnnnnnnnnnnnnnnnnnnnnnnnnnnnnnnnnnnnnnnnnnnnnnnnnnnnnnnnnnnnnnnnnnnnnnnnnnnnnnnnnnnnnnnnnnnnnnnnnnnnnnnnnnnnnnnnnnnnnnnnnnnnnnnnnnnnnnnnnnnnnnnnnnnnnnnnnnnnnnnnnnnnnnnnnnnnnnnnnnnnnnnnnnnnnnnnnnnnnnnnnnnnnnnnnnnnnnnnnnnnnnnnnnnnnnnnnnnnnnnnnnnnnnnnnnnnnnnnnnnnnnnnnnnnnnnnnnnnnnnnnnnnnnnnnnnnnnnnnnnnnnnnnnnnnnnnnnnnnnnnnnnnnnnnnnnnnnnnnnnnnnnnnnnnnnnnnnnnnnnnnnnnnnnnnnnnnnnnnnnnnnnnnnnnnnnnnnnnnnnnnnnnnnnnnnnnnnnnnnnnnnnnnnnnnnnnnnnnnnnnnnnnnnnnnnnnnnnnnnnnnnnnnnnnnnnnnnnnnnnnnnnnnnnnnnnnnnnnnnnnnnnnnnnnnnnnnnnnnnnnnnnnnnnnnnnnnnnnnnnnnnnnnnnnnnnnnnnnnnnnnnnnnnnnnnnnnnnnnnnnnnnnnnnnnnnnnnnnnnnnnnnnnnnnnnnnnnnnnnnnnnnnnnnnnnnnnnnnnnnnnnnnnnnnnnnnnnnnnnnnnnnnnnnnnnnnnnnnnnnnnnnnnnnnnnnnnnnnnnnnnnnnnnnnnnnnnnnnnnnnnnnnnnnnnnnnnnnnnnnnnnnnnnnnnnnnnnnnnnnnnnnnnnnnnnnnnnnnnnnnnnnnnnnnnnnnnnnnnnnnnnnnnnnnnnnnnnnnnnnnnnnnnnnnnnnnnnnnnnnnnnnnnnnnnnnnnnnnnnnnnnnnnnnnnnnnnnnnnnnnnnnnnnnnnnnnnnnnnnnnnnnnnnnnnnnnnnnnnnnnnnnnnnnnnnnnnnnnnnnnnnnnnnnnnnnnnnnnnnnnnnnnnnnnnnnnnnnnnnnnnnnnnnnnnnnnnnnnnnnnnnnnnnnnnnnnnnnnnnnnnnnnnnnnnnnnnnnnnnnnnnnnnnnnnnnnnnnnnnnnnnnnnnnnnnnnnnnnnnnnnnnnnnnnnnnnnnnnnnnnnnnnnnnnnnnnnnnnnnnnnnnnnnnnnnnnnnnnnnnnnnnnnnnnnnnnnnnnnnnnnnnnnnnnnnnnnnnnnnnnnnnnnnnnnnnnnnnnnnnnnnnnnnnnnnnnnnnnnnnnnnnnnnnnnnnnnnnnnnnnnnnnnnnnnnnnnnnnnnnnnnnnnnnnnnnnnnnnnnnnnnnnnnnnnnnnnnnnnnnnnnnnnnnnnnnnnnnnnnnnnnnnnnnnnnnnnnnnnnnnnnnnnnnnnnnnnnnnnnnnnnnnnnnnnnnnnnnnnnnnnnnnnnnnnnnnnnnnnnnnnnnnnnnnnnnnnnnnnnnnnnnnnnnnnnnnnnnnnnnnnnnnnnnnnnnnnnnnnnnnnnnnnnnnnnnnnnnnnnnnnnnnnnnnnnnnnnnnnnnnnnnnnnnnnnnnnnnnnnnnnnnnnnnnnnnnnnnnnnnnnnnnnnnnnnnnnnnnnnnnnnnnnnnnnnnnnnnnnnnnnnnnnnnnnnnnnnnnnnnnnnnnnnnnnnnnnnnnnnnnnnnnnnnnnnnnnnnnnnnnnnnnnnnnnnnnnnnnnnnnnnnnnnnnnnnnnnnnnnnnnnnnnnnnnnnnnnnnnnnnnnnnnnnnnnnnnnnnnnnnnnnnnnnnnnnnnnnnnnnnnnnnnnnnnnnnnnnnnnnnnnnnnnnnnnnnnnnnnnnnnnnnnnnnnnnnnnnnnnnnnnnnnnnnnnnnnnnnnnnnnnnnnnnnnnnnnnnnnnnnnnnnnnnnnnnnnnnnnnnnnnnnnnnnnnnnnnnnnnnnnnnnnnnnnnnnnnnnnnnnnnnnnnnnnnnnnnnnnnnnnnnnnnnnnnnnnnnnnnnnnnnnnnnnnnnnnnnnnnnnnnnnnnnnnnnnnnnnnnnnnnnnnnnnnnnnnnnnnnnnnnnnnnnnnnnnnnnnnnnnnnnnnnnnnnnnnnnnnnnnnnnnnnnnnnnnnnnnnnnnnnnnnnnnnnnnnnnnnnnnnnnnnnnnnnnnnnnnnnnnnnnnnnnnnnnnnnnnnnnnnnnnnnnnnnnnnnnnnnnnnnnnnnnnnnnnnnnnnnnnnnnnnnnnnnnnnnnnnnnnnnnnnnnnnnnnnnnnnnnnnnnnnnnnnnnnnnnnnnnnnnnnnnnnnnnnnnnnnnnnnnnnnnnnnnnnnnnnnnnnnnnnnnnnnnnnnnnnnnnnnnnnnnnnnnnnnnnnnnnnnnnnnnnnnnnnnnnnnnnnnnnnnnnnnnnnnnnnnnnnnnnnnnnnnnnnnnnnnnnnnnnnnnnnnnnnnnnnnnnnnnnnnnnnnnnnnnnnnnnnnnnnnnnnnnnnnnnnnnnnnnnnnnnnnnnnnnnnnnnnnnnnnnnnnnnnnnnnnnnnnnnnnnnnnnnnnnnnnnnnnnnnnnnnnnnnnnnnnnnnnnnnnnnnnnnnnnnnnnnnnnnnnnnnnnnnnnnnnnnnnnnnnnnnnnnnnnnnnnnnnnnnnnnnnnnnnnnnnnnnnnnnnnnnnnnnnnnnnnnnnnnnnnnnnnnnnnnnnnnnnnnnnnnnnnnnnnnnnnnnnnnnnnnnnnnnnnnnnnnnnnnnnnnnnnnnnnnnnnnnnnnnnnnnnnnnnnnnnnnnnnnnnnnnnnnnnnnnnnnnnnnnnnnnnnnnnnnnnnnnnnnnnnnnnnnnnnnnnnnnnnnnnnnnnnnnnnnnnnnnnnnnnnnnnnnnnnnnnnnnnnnnnnnnnnnnnnnnnnnnnnnnnnnnnnnnnnnnnnnnnnnnnnnnnnnnnnnnnnnnnnnnnnnnnnnnnnnnnnnnnnnnnnnnnnnnnnnnnnnnnnnnnnnnnnnnnnnnnnnnnnnnnnnnnnnnnnnnnnnnnnnnnnnnnnnnnnnnnnnnnnnnnnnnnnnnnnnnnnnnnnnnnnnnnnnnnnnnnnnnnnnnnnnnnnnnnnnnnnnnnnnnnnnnnnnnnnnnnnnnnnnnnnnnnnnnnnnnnnnnnnnnnnnnnnnnnnnnnnnnnnnnnnnnnnnnnnnnnnnnnnnnnnnnnnnnnnnnnnnnnnnnnnnnnnnnnnnnnnnnnnnnnnnnnnnnnnnnnnnnnnnnnnnnnnnnnnnnnnnnnnnnnnnnnnnnnnnnnnnnnnnnnnnnnnnnnnnnnnnnnnnnnnnnnnnnnnnnnnnnnnnnnnnnnnnnnnnnnnnnnnnnnnnnnnnnnnnnnnnnnnnnnnnnnnnnnnnnnnnnnnnnnnnnnnnnnnnnnnnnnnnnnnnnnnnnnnnnnnnnnnnnnnnnnnnnnnnnnnnnnnnnnnnnnnnnnnnnnnnnnnnnnnnnnnnnnnnnnnnnnnnnnnnnnnnnnnnnnnnnnnnnnnnnnnnnnnnnnnnnnnnnnnnnnnnnnnnnnnnnnnnnnnnnnnnnnnnnnnnnnnnnnnnnnnnnnnnnnnnnnnnnnnnnnnnnnnnnnnnnnnnnnnnnnnnnnnnnnnnnnnnnnnnnnnnnnnnnnnnnnnnnnnnnnnnnnnnnnnnnnnnnnnnnnnnnnnnnnnnnnnnnnnnnnnnnnnnnnnnnnnnnnnnnnnnnnnnnnnnnnnnnnnnnnnnnnnnnnnnnnnnnnnnnnnnnnnnnnnnnnnnnnnnnnnnnnnnnnnnnnnnnnnnnnnnnnnnnnnnnnnnnnnnnnnnnnnnnnnnnnnnnnnnnnnnnnnnnnnnnnnnnnnnnnnnnnnnnnnnnnnnnnnnnnnnnnnnnnnnnnnnnnnnnnnnnnnnnnnnnnnnnnnnnnnnnnnnnnnnnnnnnnnnnnnnnnnnnnnnnnnnnnnnnnnnnnnnnnnnnnnnnnnnnnnnnnnnnnnnnnnnnnnnnnnnnnnnnnnnnnnnnnnnnnnnnnnnnnnnnnnnnnnnnnnnnnnnnnnnnnnnnnnnnnnnnnnnnnnnnnnnnnnnnnnnnnnnnnnnnnnnnnnnnnnnnnnnnnnnnnnnnnnnnnnnnnnnnnnnnnnnnnnnnnnnnnnnnnnnnnnnnnnnnnnnnnnnnnnnnnnnnnnnnnnnnnnnnnnnnnnnnnnnnnnnnnnnnnnnnnnnnnnnnnnnnnnnnnnnnnnnnnnnnnnnnnnnnnnnnnnnnnnnnnnnnnnnnnnnnnnnnnnnnnnnnnnnnnnnnnnnnnnnnnnnnnnnnnnnnnnnnnnnnnnnnnnnnnnnnnnnnnnnnnnnnnnnnnnnnnnnnnnnnnnnnnnnnnnnnnnnnnnnnnnnnnnnnnnnnnnnnnnnnnnnnnnnnnnnnnnnnnnnnnnnnnnnnnnnnnnnnnnnnnnnnnnnnnnnnnnnnnnnnnnnnnnnnnnnnnnnnnnnnnnnnnnnnnnnnnnnnnnnnnnnnnnnnnnnnnnnnnnnnnnnnnnnnnnnnnnnnnnnnnnnnnnnnnnnnnnnnnnnnnnnnnnnnnnnnnnnnnnnnnnnnnnnnnnnnnnnnnnnnnnnnnnnnnnnnnnnnnnnnnnnnnnnnnnnnnnnnnnnnnnnnnnnnnnnnnnnnnnnnnnnnnnnnnnnnnnnnnnnnnnnnnnnnnnnnnnnnnnnnnnnnnnnnnnnnnnnnnnnnnnnnnnnnnnnnnnnnnnnnnnnnnnnnnnnnnnnnnnnnnnnnnnnnnnnnnnnnnnnnnnnnnnnnnnnnnnnnnnnnnnnnnnnnnnnnnnnnnnnnnnnnnnnnnnnnnnnnnnnnnnnnnnnnnnnnnnnnnnnnnnnnnnnnnnnnnnnnnnnnnnnnnnnnnnnnnnnnnnnnnnnnnnnnnnnnnnnnnnnnnnnnnnnnnnnnnnnnnnnnnnnnnnnnnnnnnnnnnnnnnnnnnnnnnnnnnnnnnnnnnnnnnnnnnnnnnnnnnnnnnnnnnnnnnnnnnnnnnnnnnnnnnnnnnnnnnnnnnnnnnnnnnnnnnnnnnnnnnnnnnnnnnnnnnnnnnnnnnnnnnnnnnnnnnnnnnnnnnnnnnnnnnnnnnnnnnnnnnnnnnnnnnnnnnnnnnnnnnnnnnnnnnnnnnnnnnnnnnnnnnnnnnnnnnnnnnnnnnnnnnnnnnnnnnnnnnnnnnnnnnnnnnnnnnnnnnnnnnnnnnnnnnnnnnnnnnnnnnnnnnnnnnnnnnnnnnnnnnnnnnnnnnnnnnnnnnnnnnnnnnnnnnnnnnnnnnnnnnnnnnnnnnnnnnnnnnnnnnnnnnnnnnnnnnnnnnnnnnnnnnnnnnnnnnnnnnnnnnnnnnnnnnnnnnnnnnnnnnnnnnnnnnnnnnnnnnnnnnnnnnnnnnnnnnnnnnnnnnnnnnnnnnnnnnnnnnnnnnnnnnnnnnnnnnnnnnnnnnnnnnnnnnnnnnnnnnnnnnnnnnnnnnnnnnnnnnnnnnnnnnnnnnnnnnnnnnnnnnnnnnnnnnnnnnnnnnnnnnnnnnnnnnnnnnnnnnnnnnnnnnnnnnnnnnnnnnnnnnnnnnnnnnnnnnnnnnnnnnnnnnnnnnnnnnnnnnnnnnnnnnnnnnnnnnnnnnnnnnnnnnnnnnnnnnnnnnnnnnnnnnnnnnnnnnnnnnnnnnnnnnnnnnnnnnnnnnnnnnnnnnnnnnnnnnnnnnnnnnnnnnnnnnnnnnnnnnnnnnnnnnnnnnnnnnnnnnnnnnnnnnnnnnnnnnnnnnnnnnnnnnnnnnnnnnnnnnnnnnnnnnnnnnnnnnnnnnnnnnnnnnnnnnnnnnnnnnnnnnnnnnnnnnnnnnnnnnnnnnnnnnnnnnnnnnnnnnnnnnnnnnnnnnnnnnnnnnnnnnnnnnnnnnnnnnnnnnnnnnnnnnnnnnnnnnnnnnnnnnnnnnnnnnnnnnnnnnnnnnnnnnnnnnnnnnnnnnnnnnnnnnnnnnnnnnnnnnnnnnnnnnnnnnnnnnnnnnnnnnnnnnnnnnnnnnnnnnnnnnnnnnnnnnnnnnnnnnnnnnnnnnnnnnnnnnnnnnnnnnnnnnnnnnnnnnnnnnnnnnnnnnnnnnnnnnnnnnnnnnnnnnnnnnnnnnnnnnnnnnnnnnnnnnnnnnnnnnnnnnnnnnnnnnnnnnnnnnnnnnnnnnnnnnnnnnnnnnnnnnnnnnnnnnnnnnnnnnnnnnnnnnnnnnnnnnnnnnnnnnnnnnnnnnnnnnnnnnnnnnnnnnnnnnnnnnnnnnnnnnnnnnnnnnnnnnnnnnnnnnnnnnnnnnnnnnnnnnnnnnnnnnnnnnnnnnnnnnnnnnnnnnnnnnnnnnnnnnnnnnnnnnnnnnnnnnnnnnnnnnnnnnnnnnnnnnnnnnnnnnnnnnnnnnnnnnnnnnnnnnnnnnnnnnnnnnnnnnnnnnnnnnnnnnnnnnnnnnnnnnnnnnnnnnnnnnnnnnnnnnnnnnnnnnnnnnnnnnnnnnnnnnnnnnnnnnnnnnnnnnnnnnnnnnnnnnnnnnnnnnnnnnnnnnnnnnnnnnnnnnnnnnnnnnnnnnnnnnnnnnnnnnnnnnnnnnnnnnnnnnnnnnnnnnnnnnnnnnnnnnnnnnnnnnnnnnnnnnnnnnnnnnnnnnnnnnnnnnnnnnnnnnnnnnnnnnnnnnnnnnnnnnnnnnnnnnnnnnnnnnnnnnnnnnnnnnnnnnnnnnnnnnnnnnnnnnnnnnnnnnnnnnnnnnnnnnnnnnnnnnnnnnnnnnnnnnnnnnnnnnnnnnnnnnnnnnnnnnnnnnnnnnnnnnnnnnnnnnnnnnnnnnnnnnnnnnnnnnnnnnnnnnnnnnnnnnnnnnnnnnnnnnnnnnnnnnnnnnnnnnnnnnnnnnnnnnnnnnnnnnnnnnnnnnnnnnnnnnnnnnnnnnnnnnnnnnnnnnnnnnnnnnnnnnnnnnnnnnnnnnnnnnnnnnnnnnnnnnnnnnnnnnnnnnnnnnnnnnnnnnnnnnnnnnnnnnnnnnnnnnnnnnnnnnnnnnnnnnnnnnnnnnnnnnnnnnnnnnnnnnnnnnnnnnnnnnnnnnnnnnnnnnnnnnnnnnnnnnnnnnnnnnnnnnnnnnnnnnnnnnnnnnnnnnnnnnnnnnnnnnnnnnnnnnnnnnnnnnnnnnnnnnnnnnnnnnnnnnnnnnnnnnnnnnnnnnnnnnnnnnnnnnnnnnnnnnnnnnnnnnnnnnnnnnnnnnnnnnnnnnnnnnnnnnnnnnnnnnnnnnnnnnnnnnnnnnnnnnnnnnnnnnnnnnnnnnnnnnnnnnnnnnnnnnnnnnnnnnnnnnnnnnnnnnnnnnnnnnnnnnnnnnnnnnnnnnnnnnnnnnnnnnnnnnnnnnnnnnnnnnnnnnnnnnnnnnnnnnnnnnnnnnnnnnnnnnnnnnnnnnnnnnnnnnnnnnnnnnnnnnnnnnnnnnnnnnnnnnnnnnnnnnnnnnnnnnnnnnnnnnnnnnnnnnnnnnnnnnnnnnnnnnnnnnnnnnnnnnnnnnnnnnnnnnnnnnnnnnnnnnnnnnnnnnnnnnnnnnnnnnnnnnnnnnnnnnnnnnnnnnnnnnnnnnnnnnnnnnnnnnnnnnnnnnnnnnnnnnnnnnnnnnnnnnnnnnnnnnnnnnnnnnnnnnnnnnnnnnnnnnnnnnnnnnnnnnnnnnnnnnnnnnnnnnnnnnnnnnnnnnnnnnnnnnnnnnnnnnnnnnnnnnnnnnnnnnnnnnnnnnnnnnnnnnnnnnnnnnnnnnnnnnnnnnnnnnnnnnnnnnnnnnnnnnnnnnnnnnnnnnnnnnnnnnnnnnnnnnnnnnnnnnnnnnnnnnnnnnnnnnnnnnnnnnnnnnnnnnnnnnnnnnnnnnnnnnnnnnnnnnnnnnnnnnnnnnnnnnnnnnnnnnnnnnnnnnnnnnnnnnnnnnnnnnnnnnnnnnnnnnnnnnnnnnnnnnnnnnnnnnnnnnnnnnnnnnnnnnnnnnnnnnnnnnnnnnnnnnnnnnnnnnnnnnnnnnnnnnnnnnnnnnnnnnnnnnnnnnnnnnnnnnnnnnnnnnnnnnnnnnnnnnnnnnnnnnnnnnnnnnnnnnnnnnnnnnnnnnnnnnnnnnnnnnnnnnnnnnnnnnnnnnnnnnnnnnnnnnnnnnnnnnnnnnnnnnnnnnnnnnnnnnnnnnnnnnnnnnnnnnnnnnnnnnnnnnnnnnnnnnnnnnnnnnnnnnnnnnnnnnnnnnnnnnnnnnnnnnnnnnnnnnnnnnnnnnnnnnnnnnnnnnnnnnnnnnnnnnnnnnnnnnnnnnnnnnnnnnnnnnnnnnnnnnnnnnnnnnnnnnnnnnnnnnnnnnnnnnnnnnnnnnnnnnnnnnnnnnnnnnnnnnnnnnnnnnnnnnnnnnnnnnnnnnnnnnnnnnnnnnnnnnnnnnnnnnnnnnnnnnnnnnnnnnnnnnnnnnnnnnnnnnnnnnnnnnnnnnnnnnnnnnnnnnnnnnnnnnnnnnnnnnnnnnnnnnnnnnnnnnnnnnnnnnnnnnnnnnnnnnnnnnnnnnnnnnnnnnnnnnnnnnnnnnnnnnnnnnnnnnnnnnnnnnnnnnnnnnnnnnnnnnnnnnnnnnnnnnnnnnnnnnnnnnnnnnnnnnnnnnnnnnnnnnnnnnnnnnnnnnnnnnnnnnnnnnnnnnnnnnnnnnnnnnnnnnnnnnnnnnnnnnnnnnnnnnnnnnnnnnnnnnnnnnnnnnnnnnnnnnnnnnnnnnnnnnnnnnnnnnnnnnnnnnnnnnnnnnnnnnnnnnnnnnnnnnnnnnnnnnnnnnnnnnnnnnnnnnnnnnnnnnnnnnnnnnnnnnnnnnnnnnnnnnnnnnnnnnnnnnnnnnnnnnnnnnnnnnnnnnnnnnnnnnnnnnnnnnnnnnnnnnnnnnnnnnnnnnnnnnnnnnnnnnnnnnnnnnnnnnnnnnnnnnnnnnnnnnnnnnnnnnnnnnnnnnnnnnnnnnnnnnnnnnnnnnnnnnnnnnnnnnnnnnnnnnnnnnnnnnnnnnnnnnnnnnnnnnnnnnnnnnnnnnnnnnnnnnnnnnnnnnnnnnnnnnnnnnnnnnnnnnnnnnnnnnnnnnnnnnnnnnnnnnnnnnnnnnnnnnnnnnnnnnnnnnnnnnnnnnnnnnnnnnnnnnnnnnnnnnnnnnnnnnnnnnnnnnnnnnnnnnnnnnnnnnnnnnnnnnnnnnnnnnnnnnnnnnnnnnnnnnnnnnnnnnnnnnnnnnnnnnnnnnnnnnnnnnnnnnnnnnnnnnnnnnnnnnnnnnnnnnnnnnnnnnnnnnnnnnnnnnnnnnnnnnnnnnnnnnnnnnnnnnnnnnnnnnnnnnnnnnnnnnnnnnnnnnnnnnnnnnnnnnnnnnnnnnnnnnnnnnnnnnnnnnnnnnnnnnnnnnnnnnnnnnnnnnnnnnnnnnnnnnnnnnnnnnnnnnnnnnnnnnnnnnnnnnnnnnnnnnnnnnnnnnnnnnnnnnnnnnnnnnnnnnnnnnnnnnnnnnnnnnnnnnnnnnnnnnnnnnnnnnnnnnnnnnnnnnnnnnnnnnnnnnnnnnnnnnnnnnnnnnnnnnnnnnnnnnnnnnnnnnnnnnnnnnnnnnnnnnnnnnnnnnnnnnnnnnnnnnnnnnnnnnnnnnnnnnnnnnnnnnnnnnnnnnnnnnnnnnnnnnnnnnnnnnnnnnnnnnnnnnnnnnnnnnnnnnnnnnnnnnnnnnnnnnnnnnnnnnnnnnnnnnnnnnnnnnnnnnnnnnnnnnnnnnnnnnnnnnnnnnnnnnnnnnnnnnnnnnnnnnnnnnnnnnnnnnnnnnnnnnnnnnnnnnnnnnnnnnnnnnnnnnnnnnnnnnnnnnnnnnnnnnnnnnnnnnnnnnnnnnnnnnnnnnnnnnnnnnnnnnnnnnnnnnnnnnnnnnnnnnnnnnnnnnnnnnnnnnnnnnnnnnnnnnnnnnnnnnnnnnnnnnnnnnnnnnnnnnnnnnnnnnnnnnnnnnnnnnnnnnnnnnnnnnnnnnnnnnnnnnnnnnnnnnnnnnnnnnnnnnnnnnnnnnnnnnnnnnnnnnnnnnnnnnnnnnnnnnnnnnnnnnnnnnnnnnnnnnnnnnnnnnnnnnnnnnnnnnnnnnnnnnnnnnnnnnnnnnnnnnnnnnnnnnnnnnnnnnnnnnnnnnnnnnnnnnnnnnnnnnnnnnnnnnnnnnnnnnnnnnnnnnnnnnnnnnnnnnnnnnnnnnnnnnnnnnnnnnnnnnnnnnnnnnnnnnnnnnnnnnnnnnnnnnnnnnnnnnnnnnnnnnnnnnnnnnnnnnnnnnnnnnnnnnnnnnnnnnnnnnnnnnnnnnnnnnnnnnnnnnnnnnnnnnnnnnnnnnnnnnnnnnnnnnnnnnnnnnnnnnnnnnnnnnnnnnnnnnnnnnnnnnnnnnnnnnnnnnnnnnnnnnnnnnnnnnnnnnnnnnnnnnnnnnnnnnnnnnnnnnnnnnnnnnnnnnnnnnnnnnnnnnnnnnnnnnnnnnnnnnnnnnnnnnnnnnnnnnnnnnnnnnnnnnnnnnnnnnnnnnnnnnnnnnnnnnnnnnnnnnnnnnnnnnnnnnnnnnnnnnnnnnnnnnnnnnnnnnnnnnnnnnnnnnnnnnnnnnnnnnnnnnnnnnnnnnnnnnnnnnnnnnnnnnnnnnnnnnnnnnnnnnnnnnnnnnnnnnnnnnnnnnnnnnnnnnnnnnnnnnnnnnnnnnnnnnnnnnnnnnnnnnnnnnnnnnnnnnnnnnnnnnnnnnnnnnnnnnnnnnnnnnnnnnnnnnnnnnnnnnnnnnnnnnnnnnnnnnnnnnnnnnnnnnnnnnnnnnnnnnnnnnnnnnnnnnnnnnnnnnnnnnnnnnnnnnnnnnnnnnnnnnnnnnnnnnnnnnnnnnnnnnnnnnnnnnnnnnnnnnnnnnnnnnnnnnnnnnnnnnnnnnnnnnnnnnnnnnnnnnnnnnnnnnnnnnnnnnnnnnnnnnnnnnnnnnnnnnnnnnnnnnnnnnnnnnnnnnnnnnnnnnnnnnnnnnnnnnnnnnnnnnnnnnnnnnnnnnnnnnnnnnnnnnnnnnnnnnnnnnnnnnnnnnnnnnnnnnnnnnnnnnnnnnnnnnnnnnnnnnnnnnnnnnnnnnnnnnnnnnnnnnnnnnnnnnnnnnnnnnnnnnnnnnnnnnnnnnnnnnnnnnnnnnnnnnnnnnnnnnnnnnnnnnnnnnnnnnnnnnnnnnnnnnnnnnnnnnnnnnnnnnnnnnnnnnnnnnnnnnnnnnnnnnnnnnnnnnnnnnnnnnnnnnnnnnnnnnnnnnnnnnnnnnnnnnnnnnnnnnnnnnnnnnnnnnnnnnnnnnnnnnnnnnnnnnnnnnnnnnnnnnnnnnnnnnnnnnnnnnnnnnnnnnnnnnnnnnnnnnnnnnnnnnnnnnnnnnnnnnnnnnnnnnnnnnnnnnnnnnnnnnnnnnnnnnnnnnnnnnnnnnnnnnnnnnnnnnnnnnnnnnnnnnnnnnnnnnnnnnnnnnnnnnnnnnnnnnnnnnnnnnnnnnnnnnnnnnnnnnnnnnnnnnnnnnnnnnnnnnnnnnnnnnnnnnnnnnnnnnnnnnnnnnnnnnnnnnnnnnnnnnnnnnnnnnnnnnnnnnnnnnnnnnnnnnnnnnnnnnnnnnnnnnnnnnnnnnnnnnnnnnnnnnnnnnnnnnnnnnnnnnnnnnnnnnnnnnnnnnnnnnnnnnnnnnnnnnnnnnnnnnnnnnnnnnnnnnnnnnnnnnnnnnnnnnnnnnnnnnnnnnnnnnnnnnnnnnnnnnnnnnnnnnnnnnnnnnnnnnnnnnnnnnnnnnnnnnnnnnnnnnnnnnnnnnnnnnnnnnnnnnnnnnnnnnnnnnnnnnnnnnnnnnnnnnnnnnnnnnnnnnnnnnnnnnnnnnnnnnnnnnnnnnnnnnnnnnnnnnnnnnnnnnnnnnnnnnnnnnnnnnnnnnnnnnnnnnnnnnnnnnnnnnnnnnnnnnnnnnnnnnnnnnnnnnnnnnnnnnnnnnnnnnnnnnnnnnnnnnnnnnnnnnnnnnnnnnnnnnnnnnnnnnnnnnnnnnnnnnnnnnnnnnnnnnnnnnnnnnnnnnnnnnnnnnnnnnnnnnnnnnnnnnnnnnnnnnnnnnnnnnnnnnnnnnnnnnnnnnnnnnnnnnnnnnnnnnnnnnnnnnnnnnnnnnnnnnnnnnnnnnnnnnnnnnnnnnnnnnnnnnnnnnnnnnnnnnnnnnnnnnnnnnnnnnnnnnnnnnnnnnnnnnnnnnnnnnnnnnnnnnnnnnnnnnnnnnnnnnnnnnnnnnnnnnnnnnnnnnnnnnnnnnnnnnnnnnnnnnnnnnnnnnnnnnnnnnnnnnnnnnnnnnnnnnnnnnnnnnnnnnnnnnnnnnnnnnnnnnnnnnnnnnnnnnnnnnnnnnnnnnnnnnnnnnnnnnnnnnnnnnnnnnnnnnnnnnnnnnnnnnnnnnnnnnnnnnnnnnnnnnnnnnnnnnnnnnnnnnnnnnnnnnnnnnnnnnnnnnnnnnnnnnnnnnnnnnnnnnnnnnnnnnnnnnnnnnnnnnnnnnnnnnnnnnnnnnnnnnnnnnnnnnnnnnnnnnnnnnnnnnnnnnnnnnnnnnnnnnnnnnnnnnnnnnnnnnnnnnnnnnnnnnnnnnnnnnnnnnnnnnnnnnnnnnnnnnnnnnnnnnnnnnnnnnnnnnnnnnnnnnnnnnnnnnnnnnnnnnnnnnnnnnnnnnnnnnnnnnnnnnnnnnnnnnnnnnnnnnnnnnnnnnnnnnnnnnnnnnnnnnnnnnnnnnnnnnnnnnnnnnnnnnnnnnnnnnnnnnnnnnnnnnnnnnnnnnnnnnnnnnnnnnnnnnnnnnnnnnnnnnnnnnnnnnnnnnnnnnnnnnnnnnnnnnnnnnnnnnnnnnnnnnnnnnnnnnnnnnnnnnnnnnnnnnnnnnnnnnnnnnnnnnnnnnnnnnnnnnnnnnnnnnnnnnnnnnnnnnnnnnnnnnnnnnnnnnnnnnnnnnnnnnnnnnnnnnnnnnnnnnnnnnnnnnnnnnnnnnnnnnnnnnnnnnnnnnnnnnnnnnnnnnnnnnnnnnnnnnnnnnnnnnnnnnnnnnnnnnnnnnnnnnnnnnnnnnnnnnnnnnnnnnnnnnnnnnnnnnnnnnnnnnnnnnnnnnnnnnnnnnnnnnnnnnnnnnnnnnnnnnnnnnnnnnnnnnnnnnnnnnnnnnnnnnnnnnnnnnnnnnnnnnnnnnnnnnnnnnnnnnnnnnnnnnnnnnnnnnnnnnnnnnnnnnnnnnnnnnnnnnnnnnnnnnnnnnnnnnnnnnnnnnnnnnnnnnnnnnnnnnnnnnnnnnnnnnnnnnnnnnnnnnnnnnnnnnnnnnnnnnnnnnnnnnnnnnnnnnnnnnnnnnnnnnnnnnnnnnnnnnnnnnnnnnnnnnnnnnnnnnnnnnnnnnnnnnnnnnnnnnnnnnnnnnnnnnnnnnnnnnnnnnnnnnnnnnnnnnnnnnnnnnnnnnnnnnnnnnnnnnnnnnnnnnnnnnnnnnnnnnnnnnnnnnnnnnnnnnnnnnnnnnnnnnnnnnnnnnnnnnnnnnnnnnnnnnnnnnnnnnnnnnnnnnnnnnnnnnnnnnnnnnnnnnnnnnnnnnnnnnnnnnnnnnnnnnnnnnnnnnnnnnnnnnnnnnnnnnnnnnnnnnnnnnnnnnnnnnnnnnnnnnnnnnnnnnnnnnnnnnnnnnnnnnnnnnnnnnnnnnnnnnnnnnnnnnnnnnnnnnnnnnnnnnnnnnnnnnnnnnnnnnnnnnnnnnnnnnnnnnnnnnnnnnnnnnnnnnnnnnnnnnnnnnnnnnnnnnnnnnnnnnnnnnnnnnnnnnnnnnnnnnnnnnnnnnnnnnnnnnnnnnnnnnnnnnnnnnnnnnnnnnnnnnnnnnnnnnnnnnnnnnnnnnnnnnnnnnnnnnnnnnnnnnnnnnnnnnnnnnnnnnnnnnnnnnnnnnnnnnnnnnnnnnnnnnnnnnnnnnnnnnnnnnnnnnnnnnnnnnnnnnnnnnnnnnnnnnnnnnnnnnnnnnnnnnnnnnnnnnnnnnnnnnnnnnnnnnnnnnnnnnnnnnnnnnnnnnnnnnnnnnnnnnnnnnnnnnnnnnnnnnnnnnnnnnnnnnnnnnnnnnnnnnnnnnnnnnnnnnnnnnnnnnnnnnnnnnnnnnnnnnnnnnnnnnnnnnnnnnnnnnnnnnnnnnnnnnnnnnnnnnnnnnnnnnnnnnnnnnnnnnnnnnnnnnnnnnnnnnnnnnnnnnnnnnnnnnnnnnnnnnnnnnnnnnnnnnnnnnnnnnnnnnnnnnnnnnnnnnnnnnnnnnnnnnnnnnnnnnnnnnnnnnnnnnnnnnnnnnnnnnnnnnnnnnnnnnnnnnnnnnnnnnnnnnnnnnnnnnnnnnnnnnnnnnnnnnnnnnnnnnnnnnnnnnnnnnnnnnnnnnnnnnnnnnnnnnnnnnnnnnnnnnnnnnnnnnnnnnnnnnnnnnnnnnnnnnnnnnnnnnnnnnnnnnnnnnnnnnnnnnnnnnnnnnnnnnnnnnnnnnnnnnnnnnnnnnnnnnnnnnnnnnnnnnnnnnnnnnnnnnnnnnnnnnnnnnnnnnnnnnnnnnnnnnnnnnnnnnnnnnnnnnnnnnnnnnnnnnnnnnnnnnnnnnnnnnnnnnnnnnnnnnnnnnnnnnnnnnnnnnnnnnnnnnnnnnnnnnnnnnnnnnnnnnnnnnnnnnnnnnnnnnnnnnnnnnnnnnnnnnnnnnnnnnnnnnnnnnnnnnnnnnnnnnnnnnnnnnnnnnnnnnnnnnnnnnnnnnnnnnnnnnnnnnnnnnnnnnnnnnnnnnnnnnnnnnnnnnnnnnnnnnnnnnnnnnnnnnnnnnnnnnnnnnnnnnnnnnnnnnnnnnnnnnnnnnnnnnnnnnnnnnnnnnnnnnnnnnnnnnnnnnnnnnnnnnnnnnnnnnnnnnnnnnnnnnnnnnnnnnnnnnnnnnnnnnnnnnnnnnnnnnnnnnnnnnnnnnnnnnnnnnnnnnnnnnnnnnnnnnnnnnnnnnnnnnnnnnnnnnnnnnnnnnnnnnnnnnnnnnnnnnnnnnnnnnnnnnnnnnnnnnnnnnnnnnnnnnnnnnnnnnnnnnnnnnnnnnnnnnnnnnnnnnnnnnnnnnnnnnnnnnnnnnnnnnnnnnnnnnnnnnnnnnnnnnnnnnnnnnnnnnnnnnnnnnnnnnnnnnnnnnnnnnnnnnnnnnnnnnnnnnnnnnnnnnnnnnnnnnnnnnnnnnnnnnnnnnnnnnnnnnnnnnnnnnnnnnnnnnnnnnnnnnnnnnnnnnnnnnnnnnnnnnnnnnnnnnnnnnnnnnnnnnnnnnnnnnnnnnnnnnnnnnnnnnnnnnnnnnnnnnnnnnnnnnnnnnnnnnnnnnnnnnnnnnnnnnnnnnnnnnnnnnnnnnnnnnnnnnnnnnnnnnnnnnnnnnnnnnnnnnnnnnnnnnnnnnnnnnnnnnnnnnnnnnnnnnnnnnnnnnnnnnnnnnnnnnnnnnnnnnnnnnnnnnnnnnnnnnnnnnnnnnnnnnnnnnnnnnnnnnnnnnnnnnnnnnnnnnnnnnnnnnnnnnnnnnnnnnnnnnnnnnnnnnnnnnnnnnnnnnnnnnnnnnnnnnnnnnnnnnnnnnnnnnnnnnnnnnnnnnnnnnnnnnnnnnnnnnnnnnnnnnnnnnnnnnnnnnnnnnnnnnnnnnnnnnnnnnnnnnnnnnnnnnnnnnnnnnnnnnnnnnnnnnnnnnnnnnnnnnnnnnnnnnnnnnnnnnnnnnnnnnnnnnnnnnnnnnnnnnnnnnnnnnnnnnnnnnnnnnnnnnnnnnnnnnnnnnnnnnnnnnnnnnnnnnnnnnnnnnnnnnnnnnnnnnnnnnnnnnnnnnnnnnnnnnnnnnnnnnnnnnnnnnnnnnnnnnnnnnnnnnnnnnnnnnnnnnnnnnnnnnnnnnnnnnnnnnnnnnnnnnnnnnnnnnnnnnnnnnnnnnnnnnnnnnnnnnnnnnnnnnnnnnnnnnnnnnnnnnnnnnnnnnnnnnnnnnnnnnnnnnnnnnnnnnnnnnnnnnnnnnnnnnnnnnnnnnnnnnnnnnnnnnnnnnnnnnnnnnnnnnnnnnnnnnnnnnnnnnnnnnnnnnnnnnnnnnnnnnnnnnnnnnnnnnnnnnnnnnnnnnnnnnnnnnnnnnnnnnnnnnnnnnnnnnnnnnnnnnnnnnnnnnnnnnnnnnnnnnnnnnnnnnnnnnnnnnnnnnnnnnnnnnnnnnnnnnnnnnnnnnnnnnnnnnnnnnnnnnnnnnnnnnnnnnnnnnnnnnnnnnnnnnnnnnnnnnnnnnnnnnnnnnnnnnnnnnnnnnnnnnnnnnnnnnnnnnnnnnnnnnnnnnnnnnnnnnnnnnnnnnnnnnnnnnnnnnnnnnnnnnnnnnnnnnnnnnnnnnnnnnnnnnnnnnnnnnnnnnnnnnnnnnnnnnnnnnnnnnnnnnnnnnnnnnnnnnnnnnnnnnnnnnnnnnnnnnnnnnnnnnnnnnnnnnnnnnnnnnnnnnnnnnnnnnnnnnnnnnnnnnnnnnnnnnnnnnnnnnnnnnnnnnnnnnnnnnnnnnnnnnnnnnnnnnnnnnnnnnnnnnnnnnnnnnnnnnnnnnnnnnnnnnnnnnnnnnnnnnnnnnnnnnnnnnnnnnnnnnnnnnnnnnnnnnnnnnnnnnnnnnnnnnnnnnnnnnnnnnnnnnnnnnnnnnnnnnnnnnnnnnnnnnnnnnnnnnnnnnnnnnnnnnnnnnnnnnnnnnnnnnnnnnnnnnnnnnnnnnnnnnnnnnnnnnnnnnnnnnnnnnnnnnnnnnnnnnnnnnnnnnnnnnnnnnnnnnnnnnnnnnnnnnnnnnnnnnnnnnnnnnnnnnnnnnnnnnnnnnnnnnnnnnnnnnnnnnnnnnnnnnnnnnnnnnnnnnnnnnnnnnnnnnnnnnnnnnnnnnnnnnnnnnnnnnnnnnnnnnnnnnnnnnnnnnnnnnnnnnnnnnnnnnnnnnnnnnnnnnnnnnnnnnnnnnnnnnnnnnnnnnnnnnnnnnnnnnnnnnnnnnnnnnnnnnnnnnnnnnnnnnnnnnnnnnnnnnnnnnnnnnnnnnnnnnnnnnnnnnnnnnnnnnnnnnnnnnnnnnnnnnnnnnnnnnnnnnnnnnnnnnnnnnnnnnnnnnnnnnnnnnnnnnnnnnnnnnnnnnnnnnnnnnnnnnnnnnnnnnnnnnnnnnnnnnnnnnnnnnnnnnnnnnnnnnnnnnnnnnnnnnnnnnnnnnnnnnnnnnnnnnnnnnnnnnnnnnnnnnnnnnnnnnnnnnnnnnnnnnnnnnnnnnnnnnnnnnnnnnnnnnnnnnnnnnnnnnnnnnnnnnnnnnnnnnnnnnnnnnnnnnnnnnnnnnnnnnnnnnnnnnnnnnnnnnnnnnnnnnnnnnnnnnnnnnnnnnnnnnnnnnnnnnnnnnnnnnnnnnnnnnnnnnnnnnnnnnnnnnnnnnnnnnnnnnnnnnnnnnnnnnnnnnnnnnnnnnnnnnnnnnnnnnnnnnnnnnnnnnnnnnnnnnnnnnnnnnnnnnnnnnnnnnnnnnnnnnnnnnnnnnnnnnnnnnnnnnnnnnnnnnnnnnnnnnnnnnnnnnnnnnnnnnnnnnnnnnnnnnnnnnnnnnnnnnnnnnnnnnnnnnnnnnnnnnnnnnnnnnnnnnnnnnnnnnnnnnnnnnnnnnnnnnnnnnnnnnnnnnnnnnnnnnnnnnnnnnnnnnnnnnnnnnnnnnnnnnnnnnnnnnnnnnnnnnnnnnnnnnnnnnnnnnnnnnnnnnnnnnnnnnnnnnnnnnnnnnnnnnnnnnnnnnnnnnnnnnnnnnnnnnnnnnnnnnnnnnnnnnnnnnnnnnnnnnnnnnnnnnnnnnnnnnnnnnnnnnnnnnnnnnnnnnnnnnnnnnnnnnnnnnnnnnnnnnnnnnnnnnnnnnnnnnnnnnnnnnnnnnnnnnnnnnnnnnnnnnnnnnnnnnnnnnnnnnnnnnnnnnnnnnnnnnnnnnnnnnnnnnnnnnnnnnnnnnnnnnnnnnnnnnnnnnnnnnnnnnnnnnnnnnnnnnnnnnnnnnnnnnnnnnnnnnnnnnnnnnnnnnnnnnnnnnnnnnnnnnnnnnnnnnnnnnnnnnnnnnnnnnnnnnnnnnnnnnnnnnnnnnnnnnnnnnnnnnnnnnnnnnnnnnnnnnnnnnnnnnnnnnnnnnnnnnnnnnnnnnnnnnnnnnnnnnnnnnnnnnnnnnnnnnnnnnnnnnnnnnnnnnnnnnnnnnnnnnnnnnnnnnnnnnnnnnnnnnnnnnnnnnnnnnnnnnnnnnnnnnnnnnnnnnnnnnnnnnnnnnnnnnnnnnnnnnnnnnnnnnnnnnnnnnnnnnnnnnnnnnnnnnnnnnnnnnnnnnnnnnnnnnnnnnnnnnnnnnnnnnnnnnnnnnnnnnnnnnnnnnnnnnnnnnnnnnnnnnnnnnnnnnnnnnnnnnnnnnnnnnnnnnnnnnnnnnnnnnnnnnnnnnnnnnnnnnnnnnnnnnnnnnnnnnnnnnnnnnnnnnnnnnnnnnnnnnnnnnnnnnnnnnnnnnnnnnnnnnnnnnnnnnnnnnnnnnnnnnnnnnnnnnnnnnnnnnnnnnnnnnnnnnnnnnnnnnnnnnnnnnnnnnnnnnnnnnnnnnnnnnnnnnnnnnnnnnnnnnnnnnnnnnnnnnnnnnnnnnnnnnnnnnnnnnnnnnnnnnnnnnnnnnnnnnnnnnnnnnnnnnnnnnnnnnnnnnnnnnnnnnnnnnnnnnnnnnnnnnnnnnnnnnnnnnnnnnnnnnnnnnnnnnnnnnnnnnnnnnnnnnnnnnnnnnnnnnnnnnnnnnnnnnnnnnnnnnnnnnnnnnnnnnnnnnnnnnnnnnnnnnnnnnnnnnnnnnnnnnnnnnnnnnnnnnnnnnnnnnnnnnnnnnnnnnnnnnnnnnnnnnnnnnnnnnnnnnnnnnnnnnnnnnnnnnnnnnnnnnnnnnnnnnnnnnnnnnnnnnnnnnnnnnnnnnnnnnnnnnnnnnnnnnnnnnnnnnnnnnnnnnnnnnnnnnnnnnnnnnnnnnnnnnnnnnnnnnnnnnnnnnnnnnnnnnnnnnnnnnnnnnnnnnnnnnnnnnnnnnnnnnnnnnnnnnnnnnnnnnnnnnnnnnnnnnnnnnnnnnnnnnnnnnnnnnnnnnnnnnnnnnnnnnnnnnnnnnnnnnnnnnnnnnnnnnnnnnnnnnnnnnnnnnnnnnnnnnnnnnnnnnnnnnnnnnnnnnnnnnnnnnnnnnnnnnnnnnnnnnnnnnnnnnnnnnnnnnnnnnnnnnnnnnnnnnnnnnnnnnnnnnnnnnnnnnnnnnnnnnnnnnnnnnnnnnnnnnnnnnnnnnnnnnnnnnnnnnnnnnnnnnnnnnnnnnnnnnnnnnnnnnnnnnnnnnnnnnnnnnnnnnnnnnnnnnnnnnnnnnnnnnnnnnnnnnnnnnnnnnnnnnnnnnnnnnnnnnnnnnnnnnnnnnnnnnnnnnnnnnnnnnnnnnnnnnnnnnnnnnnnnnnnnnnnnnnnnnnnnnnnnnnnnnnnnnnnnnnnnnnnnnnnnnnnnnnnnnnnnnnnnnnnnnnnnnnnnnnnnnnnnnnnnnnnnnnnnnnnnnnnnnnnnnnnnnnnnnnnnnnnnnnnnnnnnnnnnnnnnnnnnnnnnnnnnnnnnnnnnnnnnnnnnnnnnnnnnnnnnnnnnnnnnnnnnnnnnnnnnnnnnnnnnnnnnnnnnnnnnnnnnnnnnnnnnnnnnnnnnnnnnnnnnnnnnnnnnnnnnnnnnnnnnnnnnnnnnnnnnnnnnnnnnnnnnnnnnnnnnnnnnnnnnnnnnnnnnnnnnnnnnnnnnnnnnnnnnnnnnnnnnnnnnnnnnnnnnnnnnnnnnnnnnnnnnnnnnnnnnnnnnnnnnnnnnnnnnnnnnnnnnnnnnnnnnnnnnnnnnnnnnnnnnnnnnnnnnnnnnnnnnnnnnnnnnnnnnnnnnnnnnnnnnnnnnnnnnnnnnnnnnnnnnnnnnnnnnnnnnnnnnnnnnnnnnnnnnnnnnnnnnnnnnnnnnnnnnnnnnnnnnnnnnnnnnnnnnnnnnnnnnnnnnnnnnnnnnnnnnnnnnnnnnnnnnnnnnnnnnnnnnnnnnnnnnnnnnnnnnnnnnnnnnnnnnnnnnnnnnnnnnnnnnnnnnnnnnnnnnnnnnnnnnnnnnnnnnnnnnnnnnnnnnnnnnnnnnnnnnnnnnnnnnnnnnnnnnnnnnnnnnnnnnnnnnnnnnnnnnnnnnnnnnnnnnnnnnnnnnnnnnnnnnnnnnnnnnnnnnnnnnnnnnnnnnnnnnnnnnnnnnnnnnnnnnnnnnnnnnnnnnnnnnnnnnnnnnnnnnnnnnnnnnnnnnnnnnnnnnnnnnnnnnnnnnnnnnnnnnnnnnnnnnnnnnnnnnnnnnnnnnnnnnnnnnnnnnnnnnnnnnnnnnnnnnnnnnnnnnnnnnnnnnnnnnnnnnnnnnnnnnnnnnnnnnnnnnnnnnnnnnnnnnnnnnnnnnnnnnnnnnnnnnnnnnnnnnnnnnnnnnnnnnnnnnnnnnnnnnnnnnnnnnnnnnnnnnnnnnnnnnnnnnnnnnnnnnnnnnnnnnnnnnnnnnnnnnnnnnnnnnnnnnnnnnnnnnnnnnnnnnnnnnnnnnnnnnnnnnnnnnnnnnnnnnnnnnnnnnnnnnnnnnnnnnnnnnnnnnnnnnnnnnnnnnnnnnnnnnnnnnnnnnnnnnnnnnnnnnnnnnnnnnnnnnnnnnnnnnnnnnnnnnnnnnnnnnnnnnnnnnnnnnnnnnnnnnnnnnnnnnnnnnnnnnnnnnnnnnnnnnnnnnnnnnnnnnnnnnnnnnnnnnnnnnnnnnnnnnnnnnnnnnnnnnnnnnnnnnnnnnnnnnnnnnnnnnnnnnnnnnnnnnnnnnnnnnnnnnnnnnnnnnnnnnnnnnnnnnnnnnnnnnnnnnnnnnnnnnnnnnnnnnnnnnnnnnnnnnnnnnnnnnnnnnnnnnnnnnnnnnnnnnnnnnnnnnnnnnnnnnnnnnnnnnnnnnnnnnnnnnnnnnnnnnnnnnnnnnnnnnnnnnnnnnnnnnnnnnnnnnnnnnnnnnnnnnnnnnnnnnnnnnnnnnnnnnnnnnnnnnnnnnnnnnnnnnnnnnnnnnnnnnnnnnnnnnnnnnnnnnnnnnnnnnnnnnnnnnnnnnnnnnnnnnnnnnnnnnnnnnnnnnnnnnnnnnnnnnnnnnnnnnnnnnnnnnnnnnnnnnnnnnnnnnnnnnnnnnnnnnnnnnnnnnnnnnnnnnnnnnnnnnnnnnnnnnnnnnnnnnnnnnnnnnnnnnnnnnnnnnnnnnnnnnnnnnnnnnnnnnnnnnnnnnnnnnnnnnnnnnnnnnnnnnnnnnnnnnnnnnnnnnnnnnnnnnnnnnnnnnnnnnnnnnnnnnnnnnnnnnnnnnnnnnnnnnnnnnnnnnnnnnnnnnnnnnnnnnnnnnnnnnnnnnnnnnnnnnnnnnnnnnnnnnnnnnnnnnnnnnnnnnnnnnnnnnnnnnnnnnnnnnnnnnnnnnnnnnnnnnnnnnnnnnnnnnnnnnnnnnnnnnnnnnnnnnnnnnnnnnnnnnnnnnnnnnnnnnnnnnnnnnnnnnnnnnnnnnnnnnnnnnnnnnnnnnnnnnnnnnnnnnnnnnnnnnnnnnnnnnnnnnnnnnnnnnnnnnnnnnnnnnnnnnnnnnnnnnnnnnnnnnnnnnnnnnnnnnnnnnnnnnnnnnnnnnnnnnnnnnnnnnnnnnnnnnnnnnnnnnnnnnnnnnnnnnnnnnnnnnnnnnnnnnnnnnnnnnnnnnnnnnnnnnnnnnnnnnnnnnnnnnnnnnnnnnnnnnnnnnnnnnnnnnnnnnnnnnnnnnnnnnnnnnnnnnnnnnnnnnnnnnnnnnnnnnnnnnnnnnnnnnnnnnnnnnnnnnnnnnnnnnnnnnnnnnnnnnnnnnnnnnnnnnnnnnnnnnnnnnnnnnnnnnnnnnnnnnnnnnnnnnnnnnnnnnnnnnnnnnnnnnnnnnnnnnnnnnnnnnnnnnnnnnnnnnnnnnnnnnnnnnnnnnnnnnnnnnnnnnnnnnnnnnnnnnnnnnnnnnnnnnnnnnnnnnnnnnnnnnnnnnnnnnnnnnnnnnnnnnnnnnnnnnnnnnnnnnnnnnnnnnnnnnnnnnnnnnnnnnnnnnnnnnnnnnnnnnnnnnnnnnnnnnnnnnnnnnnnnnnnnnnnnnnnnnnnnnnnnnnnnnnnnnnnnnnnnnnnnnnnnnnnnnnnnnnnnnnnnnnnnnnnnnnnnnnnnnnnnnnnnnnnnnnnnnnnnnnnnnnnnnnnnnnnnnnnnnnnnnnnnnnnnnnnnnnnnnnnnnnnnnnnnnnnnnnnnnnnnnnnnnnnnnnnnnnnnnnnnnnnnnnnnnnnnnnnnnnnnnnnnnnnnnnnnnnnnnnnnnnnnnnnnnnnnnnnnnnnnnnnnnnnnnnnnnnnnnnnnnnnnnnnnnnnnnnnnnnnnnnnnnnnnnnnnnnnnnnnnnnnnnnnnnnnnnnnnnnnnnnnnnnnnnnnnnnnnnnnnnnnnnnnnnnnnnnnnnnnnnnnnnnnnnnnnnnnnnnnnnnnnnnnnnnnnnnnnnnnnnnnnnnnnnnnnnnnnnnnnnnnnnnnnnnnnnnnnnnnnnnnnnnnnnnnnnnnnnnnnnnnnnnnnnnnnnnnnnnnnnnnnnnnnnnnnnnnnnnnnnnnnnnnnnnnnnnnnnnnnnnnnnnnnnnnnnnnnnnnnnnnnnnnnnnnnnnnnnnnnnnnnnnnnnnnnnnnnnnnnnnnnnnnnnnnnnnnnnnnnnnnnnnnnnnnnnnnnnnnnnnnnnnnnnnnnnnnnnnnnnnnnnnnnnnnnnnnnnnnnnnnnnnnnnnnnnnnnnnnnnnnnnnnnnnnnnnnnnnnnnnnnnnnnnnnnnnnnnnnnnnnnnnnnnnnnnnnnnnnnnnnnnnnnnnnnnnnnnnnnnnnnnnnnnnnnnnnnnnnnnnnnnnnnnnnnnnnnnnnnnnnnnnnnnnnnnnnnnnnnnnnnnnnnnnnnnnnnnnnnnnnnnnnnnnnnnnnnnnnnnnnnnnnnnnnnnnnnnnnnnnnnnnnnnnnnnnnnnnnnnnnnnnnnnnnnnnnnnnnnnnnnnnnnnnnnnnnnnnnnnnnnnnnnnnnnnnnnnnnnnnnnnnnnnnnnnnnnnnnnnnnnnnnnnnnnnnnnnnnnnnnnnnnnnnnnnnnnnnnnnnnnnnnnnnnnnnnnnnnnnnnnnnnnnnnnnnnnnnnnnnnnnnnnnnnnnnnnnnnnnnnnnnnnnnnnnnnnnnnnnnnnnnnnnnnnnnnnnnnnnnnnnnnnnnnnnnnnnnnnnnnnnnnnnnnnnnnnnnnnnnnnnnnnnnnnnnnnnnnnnnnnnnnnnnnnnnnnnnnnnnnnnnnnnnnnnnnnnnnnnnnnnnnnnnnnnnnnnnnnnnnnnnnnnnnnnnnnnnnnnnnnnnnnnnnnnnnnnnnnnnnnnnnnnnnnnnnnnnnnnnnnnnnnnnnnnnnnnnnnnnnnnnnnnnnnnnnnnnnnnnnnnnnnnnnnnnnnnnnnnnnnnnnnnnnnnnnnnnnnnnnnnnnnnnnnnnnnnnnnnnnnnnnnnnnnnnnnnnnnnnnnnnnnnnnnnnnnnnnnnnnnnnnnnnnnnnnnnnnnnnnnnnnnnnnnnnnnnnnnnnnnnnnnnnnnnnnnnnnnnnnnnnnnnnnnnnnnnnnnnnnnnnnnnnnnnnnnnnnnnnnnnnnnnnnnnnnnnnnnnnnnnnnnnnnnnnnnnnnnnnnnnnnnnnnnnnnnnnnnnnnnnnnnnnnnnnnnnnnnnnnnnnnnnnnnnnnnnnnnnnnnnnnnnnnnnnnnnnnnnnnnnnnnnnnnnnnnnnnnnnnnnnnnnnnnnnnnnnnnnnnnnnnnnnnnnnnnnnnnnnnnnnnnnnnnnnnnnnnnnnnnnnnnnnnnnnnnnnnnnnnnnnnnnnnnnnnnnnnnnnnnnnnnnnnnnnnnnnnnnnnnnnnnnnnnnnnnnnnnnnnnnnnnnnnnnnnnnnnnnnnnnnnnnnnnnnnnnnnnnnnnnnnnnnnnnnnnnnnnnnnnnnnnnnnnnnnnnnnnnnnnnnnnnnnnnnnnnnnnnnnnnnnnnnnnnnnnnnnnnnnnnnnnnnnnnnnnnnnnnnnnnnnnnnnnnnnnnnnnnnnnnnnnnnnnnnnnnnnnnnnnnnnnnnnnnnnnnnnnnnnnnnnnnnnnnnnnnnnnnnnnnnnnnnnnnnnnnnnnnnnnnnnnnnnnnnnnnnnnnnnnnnnnnnnnnnnnnnnnnnnnnnnnnnnnnnnnnnnnnnnnnnnnnnnnnnnnnnnnnnnnnnnnnnnnnnnnnnnnnnnnnnnnnnnnnnnnnnnnnnnnnnnnnnnnnnnnnnnnnnnnnnnnnnnnnnnnnnnnnnnnnnnnnnnnnnnnnnnnnnnnnnnnnnnnnnnnnnnnnnnnnnnnnnnnnnnnnnnnnnnnnnnnnnnnnnnnnnnnnnnnnnnnnnnnnnnnnnnnnnnnnnnnnnnnnnnnnnnnnnnnnnnnnnnnnnnnnnnnnnnnnnnnnnnnnnnnnnnnnnnnnnnnnnnnnnnnnnnnnnnnnnnnnnnnnnnnnnnnnnnnnnnnnnnnnnnnnnnnnnnnnnnnnnnnnnnnnnnnnnnnnnnnnnnnnnnnnnnnnnnnnnnnnnnnnnnnnnnnnnnnnnnnnnnnnnnnnnnnnnnnnnnnnnnnnnnnnnnnnnnnnnnnnnnnnnnnnnnnnnnnnnnnnnnnnnnnnnnnnnnnnnnnnnnnnnnnnnnnnnnnnnnnnnnnnnnnnnnnnnnnnnnnnnnnnnnnnnnnnnnnnnnnnnnnnnnnnnnnnnnnnnnnnnnnnnnnnnnnnnnnnnnnnnnnnnnnnnnnnnnnnnnnnnnnnnnnnnnnnnnnnnnnnnnnnnnnnnnnnnnnnnnnnnnnnnnnnnnnnnnnnnnnnnnnnnnnnnnnnnnnnnnnnnnnnnnnnnnnnnnnnnnnnnnnnnnnnnnnnnnnnnnnnnnnnnnnnnnnnnnnnnnnnnnnnnnnnnnnnnnnnnnnnnnnnnnnnnnnnnnnnnnnnnnnnnnnnnnnnnnnnnnnnnnnnnnnnnnnnnnnnnnnnnnnnnnnnnnnnnnnnnnnnnnnnnnnnnnnnnnnnnnnnnnnnnnnnnnnnnnnnnnnnnnnnnnnnnnnnnnnnnnnnnnnnnnnnnnnnnnnnnnnnnnnnnnnnnnnnnnnnnnnnnnnnnnnnnnnnnnnnnnnnnnnnnnnnnnnnnnnnnnnnnnnnnnnnnnnnnnnnnnnnnnnnnnnnnnnnnnnnnnnnnnnnnnnnnnnnnnnnnnnnnnnnnnnnnnnnnnnnnnnnnnnnnnnnnnnnnnnnnnnnnnnnnnnnnnnnnnnnnnnnnnnnnnnnnnnnnnnnnnnnnnnnnnnnnnnnnnnnnnnnnnnnnnnnnnnnnnnnnnnnnnnnnnnnnnnnnnnnnnnnnnnnnnnnnnnnnnnnnnnnnnnnnnnnnnnnnnnnnnnnnnnnnnnnnnnnnnnnnnnnnnnnnnnnnnnnnnnnnnnnnnnnnnnnnnnnnnnnnnnnnnnnnnnnnnnnnnnnnnnnnnnnnnnnnnnnnnnnnnnnnnnnnnnnnnnnnnnnnnnnnnnnnnnnnnnnnnnnnnnnnnnnnnnnnnnnnnnnnnnnnnnnnnnnnnnnnnnnnnnnnnnnnnnnnnnnnnnnnnnnnnnnnnnnnnnnnnnnnnnnnnnnnnnnnnnnnnnnnnnnnnnnnnnnnnnnnnnnnnnnnnnnnnnnnnnnnnnnnnnnnnnnnnnnnnnnnnnnnnnnnnnnnnnnnnnnnnnnnnnnnnnnnnnnnnnnnnnnnnnnnnnnnnnnnnnnnnnnnnnnnnnnnnnnnnnnnnnnnnnnnnnnnnnnnnnnnnnnnnnnnnnnnnnnnnnnnnnnnnnnnnnnnnnnnnnnnnnnnnnnnnnnnnnnnnnnnnnnnnnnnnnnnnnnnnnnnnnnnnnnnnnnnnnnnnnnnnnnnnnnnnnnnnnnnnnnnnnnnnnnnnnnnnnnnnnnnnnnnnnnnnnnnnnnnnnnnnnnnnnnnnnnnnnnnnnnnnnnnnnnnnnnnnnnnnnnnnnnnnnnnnnnnnnnnnnnnnnnnnnnnnnnnnnnnnnnnnnnnnnnnnnnnnnnnnnnnnnnnnnnnnnnnnnnnnnnnnnnnnnnnnnnnnnnnnnnnnnnnnnnnnnnnnnnnnnnnnnnnnnnnnnnnnnnnnnnnnnnnnnnnnnnnnnnnnnnnnnnnnnnnnnnnnnnnnnnnnnnnnnnnnnnnnnnnnnnnnnnnnnnnnnnnnnnnnnnnnnnnnnnnnnnnnnnnnnnnnnnnnnnnnnnnnnnnnnnnnnnnnnnnnnnnnnnnnnnnnnnnnnnnnnnnnnnnnnnnnnnnnnnnnnnnnnnnnnnnnnnnnnnnnnnnnnnnnnnnnnnnnnnnnnnnnnnnnnnnnnnnnnnnnnnnnnnnnnnnnnnnnnnnnnnnnnnnnnnnnnnnnnnnnnnnnnnnnnnnnnnnnnnnnnnnnnnnnnnnnnnnnnnnnnnnnnnnnnnnnnnnnnnnnnnnnnnnnnnnnnnnnnnnnnnnnnnnnnnnnnnnnnnnnnnnnnnnnnnnnnnnnnnnnnnnnnnnnnnnnnnnnnnnnnnnnnnnnnnnnnnnnnnnnnnnnnnnnnnnnnnnnnnnnnnnnnnnnnnnnnnnnnnnnnnnnnnnnnnnnnnnnnnnnnnnnnnnnnnnnnnnnnnnnnnnnnnnnnnnnnnnnnnnnnnnnnnnnnnnnnnnnnnnnnnnnnnnnnnnnnnnnnnnnnnnnnnnnnnnnnnnnnnnnnnnnnnnnnnnnnnnnnnnnnnnnnnnnnnnnnnnnnnnnnnnnnnnnnnnnnnnnnnnnnnnnnnnnnnnnnnnnnnnnnnnnnnnnnnnnnnnnnnnnnnnnnnnnnnnnnnnnnnnnnnnnnnnnnnnnnnnnnnnnnnnnnnnnnnnnnnnnnnnnnnnnnnnnnnnnnnnnnnnnnnnnnnnnnnnnnnnnnnnnnnnnnnnnnnnnnnnnnnnnnnnnnnnnnnnnnnnnnnnnnnnnnnnnnnnnnnnnnnnnnnnnnnnnnnnnnnnnnnnnnnnnnnnnnnnnnnnnnnnnnnnnnnnnnnnnnnnnnnnnnnnnnnnnnnnnnnnnnnnnnnnnnnnnnnnnnnnnnnnnnnnnnnnnnnnnnnnnnnnnnnnnnnnnnnnnnnnnnnnnnnnnnnnnnnnnnnnnnnnnnnnnnnnnnnnnnnnnnnnnnnnnnnnnnnnnnnnnnnnnnnnnnnnnnnnnnnnnnnnnnnnnnnnnnnnnnnnnnnnnnnnnnnnnnnnnnnnnnnnnnnnnnnnnnnnnnnnnnnnnnnnnnnnnnnnnnnnnnnnnnnnnnnnnnnnnnnnnnnnnnnnnnnnnnnnnnnnnnnnnnnnnnnnnnnnnnnnnnnnnnnnnnnnnnnnnnnnnnnnnnnnnnnnnnnnnnnnnnnnnnnnnnnnnnnnnnnnnnnnnnnnnnnnnnnnnnnnnnnnnnnnnnnnnnnnnnnnnnnnnnnnnnnnnnnnnnnnnnnnnnnnnnnnnnnnnnnnnnnnnnnnnnnnnnnnnnnnnnnnnnnnnnnnnnnnnnnnnnnnnnnnnnnnnnnnnnnnnnnnnnnnnnnnnnnnnnnnnnnnnnnnnnnnnnnnnnnnnnnnnnnnnnnnnnnnnnnnnnnnnnnnnnnnnnnnnnnnnnnnnnnnnnnnnnnnnnnnnnnnnnnnnnnnnnnnnnnnnnnnnnnnnnnnnnnnnnnnnnnnnnnnnnnnnnnnnnnnnnnnnnnnnnnnnnnnnnnnnnnnnnnnnnnnnnnnnnnnnnnnnnnnnnnnnnnnnnnnnnnnnnnnnnnnnnnnnnnnnnnnnnnnnnnnnnnnnnnnnnnnnnnnnnnnnnnnnnnnnnnnnnnnnnnnnnnnnnnnnnnnnnnnnnnnnnnnnnnnnnnnnnnnnnnnnnnnnnnnnnnnnnnnnnnnnnnnnnnnnnnnnnnnnnnnnnnnnnnnnnnnnnnnnnnnnnnnnnnnnnnnnnnnnnnnnnnnnnnnnnnnnnnnnnnnnnnnnnnnnnnnnnnnnnnnnnnnnnnnnnnnnnnnnnnnnnnnnnnnnnnnnnnnnnnnnnnnnnnnnnnnnnnnnnnnnnnnnnnnnnnnnnnnnnnnnnnnnnnnnnnnnnnnnnnnnnnnnnnnnnnnnnnnnnnnnnnnnnnnnnnnnnnnnnnnnnnnnnnnnnnnnnnnnnnnnnnnnnnnnnnnnnnnnnnnnnnnnnnnnnnnnnnnnnnnnnnnnnnnnnnnnnnnnnnnnnnnnnnnnnnnnnnnnnnnnnnnnnnnnnnnnnnnnnnnnnnnnnnnnnnnnnnnnnnnnnnnnnnnnnnnnnnnnnnnnnnnnnnnnnnnnnnnnnnnnnnnnnnnnnnnnnnnnnnnnnnnnnnnnnnnnnnnnnnnnnnnnnnnnnnnnnnnnnnnnnnnnnnnnnnnnnnnnnnnnnnnnnnnnnnnnnnnnnnnnnnnnnnnnnnnnnnnnnnnnnnnnnnnnnnnnnnnnnnnnnnnnnnnnnnnnnnnnnnnnnnnnnnnnnnnnnnnnnnnnnnnnnnnnnnnnnnnnnnnnnnnnnnnnnnnnnnnnnnnnnnnnnnnnnnnnnnnnnnnnnnnnnnnnnnnnnnnnnnnnnnnnnnnnnnnnnnnnnnnnnnnnnnnnnnnnnnnnnnnnnnnnnnnnnnnnnnnnnnnnnnnnnnnnnnnnnnnnnnnnnnnnnnnnnnnnnnnnnnnnnnnnnnnnnnnnnnnnnnnnnnnnnnnnnnnnnnnnnnnnnnnnnnnnnnnnnnnnnnnnnnnnnnnnnnnnnnnnnnnnnnnnnnnnnnnnnnnnnnnnnnnnnnnnnnnnnnnnnnnnnnnnnnnnnnnnnnnnnnnnnnnnnnnnnnnnnnnnnnnnnnnnnnnnnnnnnnnnnnnnnnnnnnnnnnnnnnnnnnnnnnnnnnnnnnnnnnnnnnnnnnnnnnnnnnnnnnnnnnnnnnnnnnnnnnnnnnnnnnnnnnnnnnnnnnnnnnnnnnnnnnnnnnnnnnnnnnnnnnnnnnnnnnnnnnnnnnnnnnnnnnnnnnnnnnnnnnnnnnnnnnnnnnnnnnnnnnnnnnnnnnnnnnnnnnnnnnnnnnnnnnnnnnnnnnnnnnnnnnnnnnnnnnnnnnnnnnnnnnnnnnnnnnnnnnnnnnnnnnnnnnnnnnnnnnnnnnnnnnnnnnnnnnnnnnnnnnnnnnnnnnnnnnnnnnnnnnnnnnnnnnnnnnnnnnnnnnnnnnnnnnnnnnnnnnnnnnnnnnnnnnnnnnnnnnnnnnnnnnnnnnnnnnnnnnnnnnnnnnnnnnnnnnnnnnnnnnnnnnnnnnnnnnnnnnnnnnnnnnnnnnnnnnnnnnnnnnnnnnnnnnnnnnnnnnnnnnnnnnnnnnnnnnnnnnnnnnnnnnnnnnnnnnnnnnnnnnnnnnnnnnnnnnnnnnnnnnnnnnnnnnnnnnnnnnnnnnnnnnnnnnnnnnnnnnnnnnnnnnnnnnnnnnnnnnnnnnnnnnnnnnnnnnnnnnnnnnnnnnnnnnnnnnnnnnnnnnnnnnnnnnnnnnnnnnnnnnnnnnnnnnnnnnnnnnnnnnnnnnnnnnnnnnnnnnnnnnnnnnnnnnnnnnnnnnnnnnnnnnnnnnnnnnnnnnnnnnnnnnnnnnnnnnnnnnnnnnnnnnnnnnnnnnnnnnnnnnnnnnnnnnnnnnnnnnnnnnnnnnnnnnnnnnnnnnnnnnnnnnnnnnnnnnnnnnnnnnnnnnnnnnnnnnnnnnnnnnnnnnnnnnnnnnnnnnnnnnnnnnnnnnnnnnnnnnnnnnnnnnnnnnnnnnnnnnnnnnnnnnnnnnnnnnnnnnnnnnnnnnnnnnnnnnnnnnnnnnnnnnnnnnnnnnnnnnnnnnnnnnnnnnnnnnnnnnnnnnnnnnnnnnnnnnnnnnnnnnnnnnnnnnnnnnnnnnnnnnnnnnnnnnnnnnnnnnnnnnnnnnnnnnnnnnnnnnnnnnnnnnnnnnnnnnnnnnnnnnnnnnnnnnnnnnnnnnnnnnnnnnnnnnnnnnnnnnnnnnnnnnnnnnnnnnnnnnnnnnnnnnnnnnnnnnnnnnnnnnnnnnnnnnnnnnnnnnnnnnnnnnnnnnnnnnnnnnnnnnnnnnnnnnnnnnnnnnnnnnnnnnnnnnnnnnnnnnnnnnnnnnnnnnnnnnnnnnnnnnnnnnnnnnnnnnnnnnnnnnnnnnnnnnnnnnnnnnnnnnnnnnnnnnnnnnnnnnnnnnnnnnnnnnnnnnnnnnnnnnnnnnnnnnnnnnnnnnnnnnnnnnnnnnnnnnnnnnnnnnnnnnnnnnnnnnnnnnnnnnnnnnnnnnnnnnnnnnnnnnnnnnnnnnnnnnnnnnnnnnnnnnnnnnnnnnnnnnnnnnnnnnnnnnnnnnnnnnnnnnnnnnnnnnnnnnnnnnnnnnnnnnnnnnnnnnnnnnnnnnnnnnnnnnnnnnnnnnnnnnnnnnnnnnnnnnnnnnnnnnnnnnnnnnnnnnnnnnnnnnnnnnnnnnnnnnnnnnnnnnnnnnnnnnnnnnnnnnnnnnnnnnnnnnnnnnnnnnnnnnnnnnnnnnnnnnnnnnnnnnnnnnnnnnnnnnnnnnnnnnnnnnnnnnnnnnnnnnnnnnnnnnnnnnnnnnnnnnnnnnnnnnnnnnnnnnnnnnnnnnnnnnnnnnnnnnnnnnnnnnnnnnnnnnnnnnnnnnnnnnnnnnnnnnnnnnnnnnnnnnnnnnnnnnnnnnnnnnnnnnnnnnnnnnnnnnnnnnnnnnnnnnnnnnnnnnnnnnnnnnnnnnnnnnnnnnnnnnnnnnnnnnnnnnnnnnnnnnnnnnnnnnnnnnnnnnnnnnnnnnnnnnnnnnnnnnnnnnnnnnnnnnnnnnnnnnnnnnnnnnnnnnnnnnnnnnnnnnnnnnnnnnnnnnnnnnnnnnnnnnnnnnnnnnnnnnnnnnnnnnnnnnnnnnnnnnnnnnnnnnnnnnnnnnnnnnnnnnnnnnnnnnnnnnnnnnnnnnnnnnnnnnnnnnnnnnnnnnnnnnnnnnnnnnnnnnnnnnnnnnnnnnnnnnnnnnnnnnnnnnnnnnnnnnnnnnnnnnnnnnnnnnnnnnnnnnnnnnnnnnnnnnnnnnnnnnnnnnnnnnnnnnnnnnnnnnnnnnnnnnnnnnnnnnnnnnnnnnnnnnnnnnnnnnnnnnnnnnnnnnnnnnnnnnnnnnnnnnnnnnnnnnnnnnnnnnnnnnnnnnnnnnnnnnnnnnnnnnnnnnnnnnnnnnnnnnnnnnnnnnnnnnnnnnnnnnnnnnnnnnnnnnnnnnnnnnnnnnnnnnnnnnnnnnnnnnnnnnnnnnnnnnnnnnnnnnnnnnnnnnnnnnnnnnnnnnnnnnnnnnnnnnnnnnnnnnnnnnnnnnnnnnnnnnnnnnnnnnnnnnnnnnnnnnnnnnnnnnnnnnnnnnnnnnnnnnnnnnnnnnnnnnnnnnnnnnnnnnnnnnnnnnnnnnnnnnnnnnnnnnnnnnnnnnnnnnnnnnnnnnnnnnnnnnnnnnnnnnnnnnnnnnnnnnnnnnnnnnnnnnnnnnnnnnnnnnnnnnnnnnnnnnnnnnnnnnnnnnnnnnnnnnnnnnnnnnnnnnnnnnnnnnnnnnnnnnnnnnnnnnnnnnnnnnnnnnnnnnnnnnnnnnnnnnnnnnnnnnnnnnnnnnnnnnnnnnnnnnnnnnnnnnnnnnnnnnnnnnnnnnnnnnnnnnnnnnnnnnnnnnnnnnnnnnnnnnnnnnnnnnnnnnnnnnnnnnnnnnnnnnnnnnnnnnnnnnnnnnnnnnnnnnnnnnnnnnnnnnnnnnnnnnnnnnnnnnnnnnnnnnnnnnnnnnnnnnnnnnnnnnnnnnnnnnnnnnnnnnnnnnnnnnnnnnnnnnnnnnnnnnnnnnnnnnnnnnnnnnnnnnnnnnnnnnnnnnnnnnnnnnnnnnnnnnnnnnnnnnnnnnnnnnnnnnnnnnnnnnnnnnnnnnnnnnnnnnnnnnnnnnnnnnnnnnnnnnnnnnnnnnnnnnnnnnnnnnnnnnnnnnnnnnnnnnnnnnnnnnnnnnnnnnnnnnnnnnnnnnnnnnnnnnnnnnnnnnnnnnnnnnnnnnnnnnnnnnnnnnnnnnnnnnnnnnnnnnnnnnnnnnnnnnnnnnnnnnnnnnnnnnnnnnnnnnnnnnnnnnnnnnnnnnnnnnnnnnnnnnnnnnnnnnnnnnnnnnnnnnnnnnnnnnnnnnnnnnnnnnnnnnnnnnnnnnnnnnnnnnnnnnnnnnnnnnnnnnnnnnnnnnnnnnnnnnnnnnnnnnnnnnnnnnnnnnnnnnnnnnnnnnnnnnnnnnnnnnnnnnnnnnnnnnnnnnnnnnnnnnnnnnnnnnnnnnnnnnnnnnnnnnnnnnnnnnnnnnnnnnnnnnnnnnnnnnnnnnnnnnnnnnnnnnnnnnnnnnnnnnnnnnnnnnnnnnnnnnnnnnnnnnnnnnnnnnnnnnnnnnnnnnnnnnnnnnnnnnnnnnnnnnnnnnnnnnnnnnnnnnnnnnnnnnnnnnnnnnnnnnnnnnnnnnnnnnnnnnnnnnnnnnnnnnnnnnnnnnnnnnnnnnnnnnnnnnnnnnnnnnnnnnnnnnnnnnnnnnnnnnnnnnnnnnnnnnnnnnnnnnnnnnnnnnnnnnnnnnnnnnnnnnnnnnnnnnnnnnnnnnnnnnnnnnnnnnnnnnnnnnnnnnnnnnnnnnnnnnnnnnnnnnnnnnnnnnnnnnnnnnnnnnnnnnnnnnnnnnnnnnnnnnnnnnnnnnnnnnnnnnnnnnnnnnnnnnnnnnnnnnnnnnnnnnnnnnnnnnnnnnnnnnnnnnnnnnnnnnnnnnnnnnnnnnnnnnnnnnnnnnnnnnnnnnnnnnnnnnnnnnnnnnnnnnnnnnnnnnnnnnnnnnnnnnnnnnnnnnnnnnnnnnnnnnnnnnnnnnnnnnnnnnnnnnnnnnnnnnnnnnnnnnnnnnnnnnnnnnnnnnnnnnnnnnnnnnnnnnnnnnnnnnnnnnnnnnnnnnnnnnnnnnnnnnnnnnnnnnnnnnnnnnnnnnnnnnnnnnnnnnnnnnnnnnnnnnnnnnnnnnnnnnnnnnnnnnnnnnnnnnnnnnnnnnnnnnnnnnnnnnnnnnnnnnnnnnnnnnnnnnnnnnnnnnnnnnnnnnnnnnnnnnnnnnnnnnnnnnnnnnnnnnnnnnnnnnnnnnnnnnnnnnnnnnnnnnnnnnnnnnnnnnnnnnnnnnnnnnnnnnnnnnnnnnnnnnnnnnnnnnnnnnnnnnnnnnnnnnnnnnnnnnnnnnnnnnnnnnnnnnnnnnnnnnnnnnnnnnnnnnnnnnnnnnnnnnnnnnnnnnnnnnnnnnnnnnnnnnnnnnnnnnnnnnnnnnnnnnnnnnnnnnnnnnnnnnnnnnnnnnnnnnnnnnnnnnnnnnnnnnnnnnnnnnnnnnnnnnnnnnnnnnnnnnnnnnnnnnnnnnnnnnnnnnnnnnnnnnnnnnnnnnnnnnnnnnnnnnnnnnnnnnnnnnnnnnnnnnnnnnnnnnnnnnnnnnnnnnnnnnnnnnnnnnnnnnnnnnnnnnnnnnnnnnnnnnnnnnnnnnnnnnnnnnnnnnnnnnnnnnnnnnnnnnnnnnnnnnnnnnnnnnnnnnnnnnnnnnnnnnnnnnnnnnnnnnnnnnnnnnnnnnnnnnnnnnnnnnnnnnnnnnnnnnnnnnnnnnnnnnnnnnnnnnnnnnnnnnnnnnnnnnnnnnnnnnnnnnnnnnnnnnnnnnnnnnnnnnnnnnnnnnnnnnnnnnnnnnnnnnnnnnnnnnnnnnnnnnnnnnnnnnnnnnnnnnnnnnnnnnnnnnnnnnnnnnnnnnnnnnnnnnnnnnnnnnnnnnnnnnnnnnnnnnnnnnnnnnnnnnnnnnnnnnnnnnnnnnnnnnnnnnnnnnnnnnnnnnnnnnnnnnnnnnnnnnnnnnnnnnnnnnnnnnnnnnnnnnnnnnnnnnnnnnnnnnnnnnnnnnnnnnnnnnnnnnnnnnnnnnnnnnnnnnnnnnnnnnnnnnnnnnnnnnnnnnnnnnnnnnnnnnnnnnnnnnnnnnnnnnnnnnnnnnnnnnnnnnnnnnnnnnnnnnnnnnnnnnnnnnnnnnnnnnnnnnnnnnnnnnnnnnnnnnnnnnnnnnnnnnnnnnnnnnnnnnnnnnnnnnnnnnnnnnnnnnnnnnnnnnnnnnnnnnnnnnnnnnnnnnnnnnnnnnnnnnnnnnnnnnnnnnnnnnnnnnnnnnnnnnnnnnnnnnnnnnnnnnnnnnnnnnnnnnnnnnnnnnnnnnnnnnnnnnnnnnnnnnnnnnnnnnnnnnnnnnnnnnnnnnnnnnnnnnnnnnnnnnnnnnnnnnnnnnnnnnnnnnnnnnnnnnnnnnnnnnnnnnnnnnnnnnnnnnnnnnnnnnnnnnnnnnnnnnnnnnnnnnnnnnnnnnnnnnnnnnnnnnnnnnnnnnnnnnnnnnnnnnnnnnnnnnnnnnnnnnnnnnnnnnnnnnnnnnnnnnnnnnnnnnnnnnnnnnnnnnnnnnnnnnnnnnnnnnnnnnnnnnnnnnnnnnnnnnnnnnnnnnnnnnnnnnnnnnnnnnnnnnnnnnnnnnnnnnnnnnnnnnnnnnnnnnnnnnnnnnnnnnnnnnnnnnnnnnnnnnnnnnnnnnnnnnnnnnnnnnnnnnnnnnnnnnnnnnnnnnnnnnnnnnnnnnnnnnnnnnnnnnnnnnnnnnnnnnnnnnnnnnnnnnnnnnnnnnnnnnnnnnnnnnnnnnnnnnnnnnnnnnnnnnnnnnnnnnnnnnnnnnnnnnnnnnnnnnnnnnnnnnnnnnnnnnnnnnnnnnnnnnnnnnnnnnnnnnnnnnnnnnnnnnnnnnnnnnnnnnnnnnnnnnnnnnnnnnnnnnnnnnnnnnnnnnnnnnnnnnnnnnnnnnnnnnnnnnnnnnnnnnnnnnnnnnnnnnnnnnnnnnnnnnnnnnnnnnnnnnnnnnnnnnnnnnnnnnnnnnnnnnnnnnnnnnnnnnnnnnnnnnnnnnnnnnnnnnnnnnnnnnnnnnnnnnnnnnnnnnnnnnnnnnnnnnnnnnnnnnnnnnnnnnnnnnnnnnnnnnnnnnnnnnnnnnnnnnnnnnnnnnnnnnnnnnnnnnnnnnnnnnnnnnnnnnnnnnnnnnnnnnnnnnnnnnnnnnnnnnnnnnnnnnnnnnnnnnnnnnnnnnnnnnnnnnnnnnnnnnnnnnnnnnnnnnnnnnnnnnnnnnnnnnnnnnnnnnnnnnnnnnnnnnnnnnnnnnnnnnnnnnnnnnnnnnnnnnnnnnnnnnnnnnnnnnnnnnnnnnnnnnnnnnnnnnnnnnnnnnnnnnnnnnnnnnnnnnnnnnnnnnnnnnnnnnnnnnnnnnnnnnnnnnnnnnnnnnnnnnnnnnnnnnnnnnnnnnnnnnnnnnnnnnnnnnnnnnnnnnnnnnnnnnnnnnnnnnnnnnnnnnnnnnnnnnnnnnnnnnnnnnnnnnnnnnnnnnnnnnnnnnnnnnnnnnnnnnnnnnnnnnnnnnnnnnnnnnnnnnnnnnnnnnnnnnnnnnnnnnnnnnnnnnnnnnnnnnnnnnnnnnnnnnnnnnnnnnnnnnnnnnnnnnnnnnnnnnnnnnnnnnnnnnnnnnnnnnnnnnnnnnnnnnnnnnnnnnnnnnnnnnnnnnnnnnnnnnnnnnnnnnnnnnnnnnnnnnnnnnnnnnnnnnnnnnnnnnnnnnnnnnnnnnnnnnnnnnnnnnnnnnnnnnnnnnnnnnnnnnnnnnnnnnnnnnnnnnnnnnnnnnnnnnnnnnnnnnnnnnnnnnnnnnnnnnnnnnnnnnnnnnnnnnnnnnnnnnnnnnnnnnnnnnnnnnnnnnnnnnnnnnnnnnnnnnnnnnnnnnnnnnnnnnnnnnnnnnnnnnnnnnnnnnnnnnnnnnnnnnnnnnnnnnnnnnnnnnnnnnnnnnnnnnnnnnnnnnnnnnnnnnnnnnnnnnnnnnnnnnnnnnnnnnnnnnnnnnnnnnnnnnnnnnnnnnnnnnnnnnnnnnnnnnnnnnnnnnnnnnnnnnnnnnnnnnnnnnnnnnnnnnnnnnnnnnnnnnnnnnnnnnnnnnnnnnnnnnnnnnnnnnnnnnnnnnnnnnnnnnnnnnnnnnnnnnnnnnnnnnnnnnnnnnnnnnnnnnnnnnnnnnnnnnnnnnnnnnnnnnnnnnnnnnnnnnnnnnnnnnnnnnnnnnnnnnnnnnnnnnnnnnnnnnnnnnnnnnnnnnnnnnnnnnnnnnnnnnnnnnnnnnnnnnnnnnnnnnnnnnnnnnnnnnnnnnnnnnnnnnnnnnnnnnnnnnnnnnnnnnnnnnnnnnnnnnnnnnnnnnnnnnnnnnnnnnnnnnnnnnnnnnnnnnnnnnnnnnnnnnnnnnnnnnnnnnnnnnnnnnnnnnnnnnnnnnnnnnnnnnnnnnnnnnnnnnnnnnnnnnnnnnnnnnnnnnnnnnnnnnnnnnnnnnnnnnnnnnnnnnnnnnnnnnnnnnnnnnnnnnnnnnnnnnnnnnnnnnnnnnnnnnnnnnnnnnnnnnnnnnnnnnnnnnnnnnnnnnnnnnnnnnnnnnnnnnnnnnnnnnnnnnnnnnnnnnnnnnnnnnnnnnnnnnnnnnnnnnnnnnnnnnnnnnnnnnnnnnnnnnnnnnnnnnnnnnnnnnnnnnnnnnnnnnnnnnnnnnnnnnnnnnnnnnnnnnnnnnnnnnnnnnnnnnnnnnnnnnnnnnnnnnnnnnnnnnnnnnnnnnnnnnnnnnnnnnnnnnnnnnnnnnnnnnnnnnnnnnnnnnnnnnnnnnnnnnnnnnnnnnnnnnnnnnnnnnnnnnnnnnnnnnnnnnnnnnnnnnnnnnnnnnnnnnnnnnnnnnnnnnnnnnnnnnnnnnnnnnnnnnnnnnnnnnnnnnnnnnnnnnnnnnnnnnnnnnnnnnnnnnnnnnnnnnnnnnnnnnnnnnnnnnnnnnnnnnnnnnnnnnnnnnnnnnnnnnnnnnnnnnnnnnnnnnnnnnnnnnnnnnnnnnnnnnnnnnnnnnnnnnnnnnnnnnnnnnnnnnnnnnnnnnnnnnnnnnnnnnnnnnnnnnnnnnnnnnnnnnnnnnnnnnnnnnnnnnnnnnnnnnnnnnnnnnnnnnnnnnnnnnnnnnnnnnnnnnnnnnnnnnnnnnnnnnnnnnnnnnnnnnnnnnnnnnnnnnnnnnnnnnnnnnnnnnnnnnnnnnnnnnnnnnnnnnnnnnnnnnnnnnnnnnnnnnnnnnnnnnnnnnnnnnnnnnnnnnnnnnnnnnnnnnnnnnnnnnnnnnnnnnnnnnnnnnnnnnnnnnnnnnnnnnnnnnnnnnnnnnnnnnnnnnnnnnnnnnnnnnnnnnnnnnnnnnnnnnnnnnnnnnnnnnnnnnnnnnnnnnnnnnnnnnnnnnnnnnnnnnnnnnnnnnnnnnnnnnnnnnnnnnnnnnnnnnnnnnnnnnnnnnnnnnnnnnnnnnnnnnnnnnnnnnnnnnnnnnnnnnnnnnnnnnnnnnnnnnnnnnnnnnnnnnnnnnnnnnnnnnnnnnnnnnnnnnnnnnnnnnnnnnnnnnnnnnnnnnnnnnnnnnnnnnnnnnnnnnnnnnnnnnnnnnnnnnnnnnnnnnnnnnnnnnnnnnnnnnnnnnnnnnnnnnnnnnnnnnnnnnnnnnnnnnnnnnnnnnnnnnnnnnnnnnnnnnnnnnnnnnnnnnnnnnnnnnnnnnnnnnnnnnnnnnnnnnnnnnnnnnnnnnnnnnnnnnnnnnnnnnnnnnnnnnnnnnnnnnnnnnnnnnnnnnnnnnnnnnnnnnnnnnnnnnnnnnnnnnnnnnnnnnnnnnnnnnnnnnnnnnnnnnnnnnnnnnnnnnnnnnnnnnnnnnnnnnnnnnnnnnnnnnnnnnnnnnnnnnnnnnnnnnnnnnnnnnnnnnnnnnnnnnnnnnnnnnnnnnnnnnnnnnnnnnnnnnnnnnnnnnnnnnnnnnnnnnnnnnnnnnnnnnnnnnnnnnnnnnnnnnnnnnnnnnnnnnnnnnnnnnnnnnnnnnnnnnnnnnnnnnnnnnnnnnnnnnnnnnnnnnnnnnnnnnnnnnnnnnnnnnnnnnnnnnnnnnnnnnnnnnnnnnnnnnnnnnnnnnnnnnnnnnnnnnnnnnnnnnnnnnnnnnnnnnnnnnnnnnnnnnnnnnnnnnnnnnnnnnnnnnnnnnnnnnnnnnnnnnnnnnnnnnnnnnnnnnnnnnnnnnnnnnnnnnnnnnnnnnnnnnnnnnnnnnnnnnnnnnnnnnnnnnnnnnnnnnnnnnnnnnnnnnnnnnnnnnnnnnnnnnnnnnnnnnnnnnnnnnnnnnnnnnnnnnnnnnnnnnnnnnnnnnnnnnnnnnnnnnnnnnnnnnnnnnnnnnnnnnnnnnnnnnnnnnnnnnnnnnnnnnnnnnnnnnnnnnnnnnnnnnnnnnnnnnnnnnnnnnnnnnnnnnnnnnnnnnnnnnnnnnnnnnnnnnnnnnnnnnnnnnnnnnnnnnnnnnnnnnnnnnnnnnnnnnnnnnnnnnnnnnnnnnnnnnnnnnnnnnnnnnnnnnnnnnnnnnnnnnnnnnnnnnnnnnnnnnnnnnnnnnnnnnnnnnnnnnnnnnnnnnnnnnnnnnnnnnnnnnnnnnnnnnnnnnnnnnnnnnnnnnnnnnnnnnnnnnnnnnnnnnnnnnnnnnnnnnnnnnnnnnnnnnnnnnnnnnnnnnnnnnnnnnnnnnnnnnnnnnnnnnnnnnnnnnnnnnnnnnnnnnnnnnnnnnnnnnnnnnnnnnnnnnnnnnnnnnnnnnnnnnnnnnnnnnnnnnnnnnnnnnnnnnnnnnnnnnnnnnnnnnnnnnnnnnnnnnnnnnnnnnnnnnnnnnnnnnnnnnnnnnnnnnnnnnnnnnnnnnnnnnnnnnnnnnnnnnnnnnnnnnnnnnnnnnnnnnnnnnnnnnnnnnnnnnnnnnnnnnnnnnnnnnnnnnnnnnnnnnnnnnnnnnnnnnnnnnnnnnnnnnnnnnnnnnnnnnnnnnnnnnnnnnnnnnnnnnnnnnnnnnnnnnnnnnnnnnnnnnnnnnnnnnnnnnnnnnnnnnnnnnnnnnnnnnnnnnnnnnnnnnnnnnnnnnnnnnnnnnnnnnnnnnnnnnnnnnnnnnnnnnnnnnnnnnnnnnnnnnnnnnnnnnnnnnnnnnnnnnnnnnnnnnnnnnnnnnnnnnnnnnnnnnnnnnnnnnnnnnnnnnnnnnnnnnnnnnnnnnnnnnnnnnnnnnnnnnnnnnnnnnnnnnnnnnnnnnnnnnnnnnnnnnnnnnnnnnnnnnnnnnnnnnnnnnnnnnnnnnnnnnnnnnnnnnnnnnnnnnnnnnnnnnnnnnnnnnnnnnnnnnnnnnnnnnnnnnnnnnnnnnnnnnnnnnnnnnnnnnnnnnnnnnnnnnnnnnnnnnnnnnnnnnnnnnnnnnnnnnnnnnnnnnnnnnnnnnnnnnnnnnnnnnnnnnnnnnnnnnnnnnnnnnnnnnnnnnnnnnnnnnnnnnnnnnnnnnnnnnnnnnnnnnnnnnnnnnnnnnnnnnnnnnnnnnnnnnnnnnnnnnnnnnnnnnnnnnnnnnnnnnnnnnnnnnnnnnnnnnnnnnnnnnnnnnnnnnnnnnnnnnnnnnnnnnnnnnnnnnnnnnnnnnnnnnnnnnnnnnnnnnnnnnnnnnnnnnnnnnnnnnnnnnnnnnnnnnnnnnnnnnnnnnnnnnnnnnnnnnnnnnnnnnnnnnnnnnnnnnnnnnnnnnnnnnnnnnnnnnnnnnnnnnnnnnnnnnnnnnnnnnnnnnnnnnnnnnnnnnnnnnnnnnnnnnnnnnnnnnnnnnnnnnnnnnnnnnnnnnnnnnnnnnnnnnnnnnnnnnnnnnnnnnnnnnnnnnnnnnnnnnnnnnnnnnnnnnnnnnnnnnnnnnnnnnnnnnnnnnnnnnnnnnnnnnnnnnnnnnnnnnnnnnnnnnnnnnnnnnnnnnnnnnnnnnnnnnnnnnnnnnnnnnnnnnnnnnnnnnnnnnnnnnnnnnnnnnnnnnnnnnnnnnnnnnnnnnnnnnnnnnnnnnnnnnnnnnnnnnnnnnnnnnnnnnnnnnnnnnnnnnnnnnnnnnnnnnnnnnnnnnnnnnnnnnnnnnnnnnnnnnnnnnnnnnnnnnnnnnnnnnnnnnnnnnnnnnnnnnnnnnnnnnnnnnnnnnnnnnnnnnnnnnnnnnnnnnnnnnnnnnnnnnnnnnnnnnnnnnnnnnnnnnnnnnnnnnnnnnnnnnnnnnnnnnnnnnnnnnnnnnnnnnnnnnnnnnnnnnnnnnnnnnnnnnnnnnnnnnnnnnnnnnnnnnnnnnnnnnnnnnnnnnnnnnnnnnnnnnnnnnnnnnnnnnnnnnnnnnnnnnnnnnnnnnnnnnnnnnnnnnnnnnnnnnnnnnnnnnnnnnnnnnnnnnnnnnnnnnnnnnnnnnnnnnnnnnnnnnnnnnnnnnnnnnnnnnnnnnnnnnnnnnnnnnnnnnnnnnnnnnnnnnnnnnnnnnnnnnnnnnnnnnnnnnnnnnnnnnnnnnnnnnnnnnnnnnnnnnnnnnnnnnnnnnnnnnnnnnnnnnnnnnnnnnnnnnnnnnnnnnnnnnnnnnnnnnnnnnnnnnnnnnnnnnnnnnnnnnnnnnnnnnnnnnnnnnnnnnnnnnnnnnnnnnnnnnnnnnnnnnnnnnnnnnnnnnnnnnnnnnnnnnnnnnnnnnnnnnnnnnnnnnnnnnnnnnnnnnnnnnnnnnnnnnnnnnnnnnnnnnnnnnnnnnnnnnnnnnnnnnnnnnnnnnnnnnnnnnnnnnnnnnnnnnnnnnnnnnnnnnnnnnnnnnnnnnnnnnnnnnnnnnnnnnnnnnnnnnnnnnnnnnnnnnnnnnnnnnnnnnnnnnnnnnnnnnnnnnnnnnnnnnnnnnnnnnnnnnnnnnnnnnnnnnnnnnnnnnnnnnnnnnnnnnnnnnnnnnnnnnnnnnnnnnnnnnnnnnnnnnnnnnnnnnnnnnnnnnnnnnnnnnnnnnnnnnnnnnnnnnnnnnnnnnnnnnnnnnnnnnnnnnnnnnnnnnnnnnnnnnnnnnnnnnnnnnnnnnnnnnnnnnnnnnnnnnnnnnnnnnnnnnnnnnnnnnnnnnnnnnnnnnnnnnnnnnnnnnnnnnnnnnnnnnnnnnnnnnnnnnnnnnnnnnnnnnnnnnnnnnnnnnnnnnnnnnnnnnnnnnnnnnnnnnnnnnnnnnnnnnnnnnnnnnnnnnnnnnnnnnnnnnnnnnnnnnnnnnnnnnnnnnnnnnnnnnnnnnnnnnnnnnnnnnnnnnnnnnnnnnnnnnnnnnnnnnnnnnnnnnnnnnnnnnnnnnnnnnnnnnnnnnnnnnnnnnnnnnnnnnnnnnnnnnnnnnnnnnnnnnnnnnnnnnnnnnnnnnnnnnnnnnnnnnnnnnnnnnnnnnnnnnnnnnnnnnnnnnnnnnnnnnnnnnnnnnnnnnnnnnnnnnnnnnnnnnnnnnnnnnnnnnnnnnnnnnnnnnnnnnnnnnnnnnnnnnnnnnnnnnnnnnnnnnnnnnnnnnnnnnnnnnnnnnnnnnnnnnnnnnnnnnnnnnnnnnnnnnnnnnnnnnnnnnnnnnnnnnnnnnnnnnnnnnnnnnnnnnnnnnnnnnnnnnnnnnnnnnnnnnnnnnnnnnnnnnnnnnnnnnnnnnnnnnnnnnnnnnnnnnnnnnnnnnnnnnnnnnnnnnnnnnnnnnnnnnnnnnnnnnnnnnnnnnnnnnnnnnnnnnnnnnnnnnnnnnnnnnnnnnnnnnnnnnnnnnnnnnnnnnnnnnnnnnnnnnnnnnnnnnnnnnnnnnnnnnnnnnnnnnnnnnnnnnnnnnnnnnnnnnnnnnnnnnnnnnnnnnnnnnnnnnnnnnnnnnnnnnnnnnnnnnnnnnnnnnnnnnnnnnnnnnnnnnnnnnnnnnnnnnnnnnnnnnnnnnnnnnnnnnnnnnnnnnnnnnnnnnnnnnnnnnnnnnnnnnnnnnnnnnnnnnnnnnnnnnnnnnnnnnnnnnnnnnnnnnnnnnnnnnnnnnnnnnnnnnnnnnnnnnnnnnnnnnnnnnnnnnnnnnnnnnnnnnnnnnnnnnnnnnnnnnnnnnnnnnnnnnnnnnnnnnnnnnnnnnnnnnnnnnnnnnnnnnnnnnnnnnnnnnnnnnnnnnnnnnnnnnnnnnnnnnnnnnnnnnnnnnnnnnnnnnnnnnnnnnnnnnnnnnnnnnnnnnnnnnnnnnnnnnnnnnnnnnnnnnnnnnnnnnnnnnnnnnnnnnnnnnnnnnnnnnnnnnnnnnnnnnnnnnnnnnnnnnnnnnnnnnnnnnnnnnnnnnnnnnnnnnnnnnnnnnnnnnnnnnnnnnnnnnnnnnnnnnnnnnnnnnnnnnnnnnnnnnnnnnnnnnnnnnnnnnnnnnnnnnnnnnnnnnnnnnnnnnnnnnnnnnnnnnnnnnnnnnnnnnnnnnnnnnnnnnnnnnnnnnnnnnnnnnnnnnnnnnnnnnnnnnnnnnnnnnnnnnnnnnnnnnnnnnnnnnnnnnnnnnnnnnnnnnnnnnnnnnnnnnnnnnnnnnnnnnnnnnnnnnnnnnnnnnnnnnnnnnnnnnnnnnnnnnnnnnnnnnnnnnnnnnnnnnnnnnnnnnnnnnnnnnnnnnnnnnnnnnnnnnnnnnnnnnnnnnnnnnnnnnnnnnnnnnnnnnnnnnnnnnnnnnnnnnnnnnnnnnnnnnnnnnnnnnnnnnnnnnnnnnnnnnnnnnnnnnnnnnnnnnnnnnnnnnnnnnnnnnnnnnnnnnnnnnnnnnnnnnnnnnnnnnnnnnnnnnnnnnnnnnnnnnnnnnnnnnnnnnnnnnnnnnnnnnnnnnnnnnnnnnnnnnnnnnnnnnnnnnnnnnnnnnnnnnnnnnnnnnnnnnnnnnnnnnnnnnnnnnnnnnnnnnnnnnnnnnnnnnnnnnnnnnnnnnnnnnnnnnnnnnnnnnnnnnnnnnnnnnnnnnnnnnnnnnnnnnnnnnnnnnnnnnnnnnnnnnnnnnnnnnnnnnnnnnnnnnnnnnnnnnnnnnnnnnnnnnnnnnnnnnnnnnnnnnnnnnnnnnnnnnnnnnnnnnnnnnnnnnnnnnnnnnnnnnnnnnnnnnnnnnnnnnnnnnnnnnnnnnnnnnnnnnnnnnnnnnnnnnnnnnnnnnnnnnnnnnnnnnnnnnnnnnnnnnnnnnnnnnnnnnnnnnnnnnnnnnnnnnnnnnnnnnnnnnnnnnnnnnnnnnnnnnnnnnnnnnnnnnnnnnnnnnnnnnnnnnnnnnnnnnnnnnnnnnnnnnnnnnnnnnnnnnnnnnnnnnnnnnnnnnnnnnnnnnnnnnnnnnnnnnnnnnnnnnnnnnnnnnnnnnnnnnnnnnnnnnnnnnnnnnnnnnnnnnnnnnnnnnnnnnnnnnnnnnnnnnnnnnnnnnnnnnnnnnnnnnnnnnnnnnnnnnnnnnnnnnnnnnnnnnnnnnnnnnnnnnnnnnnnnnnnnnnnnnnnnnnnnnnnnnnnnnnnnnnnnnnnnnnnnnnnnnnnnnnnnnnnnnnnnnnnnnnnnnnnnnnnnnnnnnnnnnnnnnnnnnnnnnnnnnnnnnnnnnnnnnnnnnnnnnnnnnnnnnnnnnnnnnnnnnnnnnnnnnnnnnnnnnnnnnnnnnnnnnnnnnnnnnnnnnnnnnnnnnnnnnnnnnnnnnnnnnnnnnnnnnnnnnnnnnnnnnnnnnnnnnnnnnnnnnnnnnnnnnnnnnnnnnnnnnnnnnnnnnnnnnnnnnnnnnnnnnnnnnnnnnnnnnnnnnnnnnnnnnnnnnnnnnnnnnnnnnnnnnnnnnnnnnnnnnnnnnnnnnnnnnnnnnnnnnnnnnnnnnnnnnnnnnnnnnnnnnnnnnnnnnnnnnnnnnnnnnnnnnnnnnnnnnnnnnnnnnnnnnnnnnnnnnnnnnnnnnnnnnnnnnnnnnnnnnnnnnnnnnnnnnnnnnnnnnnnnnnnnnnnnnnnnnnnnnnnnnnnnnnnnnnnnnnnnnnnnnnnnnnnnnnnnnnnnnnnnnnnnnnnnnnnnnnnnnnnnnnnnnnnnnnnnnnnnnnnnnnnnnnnnnnnnnnnnnnnnnnnnnnnnnnnnnnnnnnnnnnnnnnnnnnnnnnnnnnnnnnnnnnnnnnnnnnnnnnnnnnnnnnnnnnnnnnnnnnnnnnnnnnnnnnnnnnnnnnnnnnnnnnnnnnnnnnnnnnnnnnnnnnnnnnnnnnnnnnnnnnnnnnnnnnnnnnnnnnnnnnnnnnnnnnnnnnnnnnnnnnnnnnnnnnnnnnnnnnnnnnnnnnnnnnnnnnnnnnnnnnnnnnnnnnnnnnnnnnnnnnnnnnnnnnnnnnnnnnnnnnnnnnnnnnnnnnnnnnnnnnnnnnnnnnnnnnnnnnnnnnnnnnnnnnnnnnnnnnnnnnnnnnnnnnnnnnnnnnnnnnnnnnnnnnnnnnnnnnnnnnnnnnnnnnnnnnnnnnnnnnnnnnnnnnnnnnnnnnnnnnnnnnnnnnnnnnnnnnnnnnnnnnnnnnnnnnnnnnnnnnnnnnnnnnnnnnnnnnnnnnnnnnnnnnnnnnnnnnnnnnnnnnnnnnnnnnnnnnnnnnnnnnnnnnnnnnnnnnnnnnnnnnnnnnnnnnnnnnnnnnnnnnnnnnnnnnnnnnnnnnnnnnnnnnnnnnnnnnnnnnnnnnnnnnnnnnnnnnnnnnnnnnnnnnnnnnnnnnnnnnnnnnnnnnnnnnnnnnnnnnnnnnnnnnnnnnnnnnnnnnnnnnnnnnnnnnnnnnnnnnnnnnnnnnnnnnnnnnnnnnnnnnnnnnnnnnnnnnnnnnnnnnnnnnnnnnnnnnnnnnnnnnnnnnnnnnnnnnnnnnnnnnnnnnnnnnnnnnnnnnnnnnnnnnnnnnnnnnnnnnnnnnnnnnnnnnnnnnnnnnnnnnnnnnnnnnnnnnnnnnnnnnnnnnnnnnnnnnnnnnnnnnnnnnnnnnnnnnnnnnnnnnnnnnnnnnnnnnnnnnnnnnnnnnnnnnnnnnnnnnnnnnnnnnnnnnnnnnnnnnnnnnnnnnnnnnnnnnnnnnnnnnnnnnnnnnnnnnnnnnnnnnnnnnnnnnnnnnnnnnnnnnnnnnnnnnnnnnnnnnnnnnnnnnnnnnnnnnnnnnnnnnnnnnnnnnnnnnnnnnnnnnnnnnnnnnnnnnnnnnnnnnnnnnnnnnnnnnnnnnnnnnnnnnnnnnnnnnnnnnnnnnnnnnnnnnnnnnnnnnnnnnnnnnnnnnnnnnnnnnnnnnnnnnnnnnnnnnnnnnnnnnnnnnnnnnnnnnnnnnnnnnnnnnnnnnnnnnnnnnnnnnnnnnnnnnnnnnnnnnnnnnnnnnnnnnnnnnnnnnnnnnnnnnnnnnnnnnnnnnnnnnnnnnnnnnnnnnnnnnnnnnnnnnnnnnnnnnnnnnnnnnnnnnnnnnnnnnnnnnnnnnnnnnnnnnnnnnnnnnnnnnnnnnnnnnnnnnnnnnnnnnnnnnnnnnnnnnnnnnnnnnnnnnnnnnnnnnnnnnnnnnnnnnnnnnnnnnnnnnnnnnnnnnnnnnnnnnnnnnnnnnnnnnnnnnnnnnnnnnnnnnnnnnnnnnnnnnnnnnnnnnnnnnnnnnnnnnnnnnnnnnnnnnnnnnnnnnnnnnnnnnnnnnnnnnnnnnnnnnnnnnnnnnnnnnnnnnnnnnnnnnnnnnnnnnnnnnnnnnnnnnnnnnnnnnnnnnnnnnnnnnnnnnnnnnnnnnnnnnnnnnnnnnnnnnnnnnnnnnnnnnnnnnnnnnnnnnnnnnnnnnnnnnnnnnnnnnnnnnnnnnnnnnnnnnnnnnnnnnnnnnnnnnnnnnnnnnnnnnnnnnnnnnnnnnnnnnnnnnnnnnnnnnnnnnnnnnnnnnnnnnnnnnnnnnnnnnnnnnnnnnnnnnnnnnnnnnnnnnnnnnnnnnnnnnnnnnnnnnnnnnnnnnnnnnnnnnnnnnnnnnnnnnnnnnnnnnnnnnnnnnnnnnnnnnnnnnnnnnnnnnnnnnnnnnnnnnnnnnnnnnnnnnnnnnnnnnnnnnnnnnnnnnnnnnnnnnnnnnnnnnnnnnnnnnnnnnnnnnnnnnnnnnnnnnnnnnnnnnnnnnnnnnnnnnnnnnnnnnnnnnnnnnnnnnnnnnnnnnnnnnnnnnnnnnnnnnnnnnnnnnnnnnnnnnnnnnnnnnnnnnnnnnnnnnnnnnnnnnnnnnnnnnnnnnnnnnnnnnnnnnnnnnnnnnnnnnnnnnnnnnnnnnnnnnnnnnnnnnnnnnnnnnnnnnnnnnnnnnnnnnnnnnnnnnnnnnnnnnnnnnnnnnnnnnnnnnnnnnnnnnnnnnnnnnnnnnnnnnnnnnnnnnnnnnnnnnnnnnnnnnnnnnnnnnnnnnnnnnnnnnnnnnnnnnnnnnnnnnnnnnnnnnnnnnnnnnnnnnnnnnnnnnnnnnnnnnnnnnnnnnnnnnnnnnnnnnnnnnnnnnnnnnnnnnnnnnnnnnnnnnnnnnnnnnnnnnnnnnnnnnnnnnnnnnnnnnnnnnnnnnnnnnnnnnnnnnnnnnnnnnnnnnnnnnnnnnnnnnnnnnnnnnnnnnnnnnnnnnnnnnnnnnnnnnnnnnnnnnnnnnnnnnnnnnnnnnnnnnnnnnnnnnnnnnnnnnnnnnnnnnnnnnnnnnnnnnnnnnnnnnnnnnnnnnnnnnnnnnnnnnnnnnnnnnnnnnnnnnnnnnnnnnnnnnnnnnnnnnnnnnnnnnnnnnnnnnnnnnnnnnnnnnnnnnnnnnnnnnnnnnnnnnnnnnnnnnnnnnnnnnnnnnnnnnnnnnnnnnnnnnnnnnnnnnnnnnnnnnnnnnnnnnnnnnnnnnnnnnnnnnnnnnnnnnnnnnnnnnnnnnnnnnnnnnnnnnnnnnnnnnnnnnnnnnnnnnnnnnnnnnnnnnnnnnnnnnnnnnnnnnnnnnnnnnnnnnnnnnnnnnnnnnnnnnnnnnnnnnnnnnnnnnnnnnnnnnnnnnnnnnnnnnnnnnnnnnnnnnnnnnnnnnnnnnnnnnnnnnnnnnnnnnnnnnnnnnnnnnnnnnnnnnnnnnnnnnnnnnnnnnnnnnnnnnnnnnnnnnnnnnnnnnnnnnnnnnnnnnnnnnnnnnnnnnnnnnnnnnnnnnnnnnnnnnnnnnnnnnnnnnnnnnnnnnnnnnnnnnnnnnnnnnnnnnnnnnnnnnnnnnnnnnnnnnnnnnnnnnnnnnnnnnnnnnnnnnnnnnnnnnnnnnnnnnnnnnnnnnnnnnnnnnnnnnnnnnnnnnnnnnnnnnnnnnnnnnnnnnnnnnnnnnnnnnnnnnnnnnnnnnnnnnnnnnnnnnnnnnnnnnnnnnnnnnnnnnnnnnnnnnnnnnnnnnnnnnnnnnnnnnnnnnnnnnnnnnnnnnnnnnnnnnnnnnnnnnnnnnnnnnnnnnnnnnnnnnnnnnnnnnnnnnnnnnnnnnnnnnnnnnnnnnnnnnnnnnnnnnnnnnnnnnnnnnnnnnnnnnnnnnnnnnnnnnnnnnnnnnnnnnnnnnnnnnnnnnnnnnnnnnnnnnnnnnnnnnnnnnnnnnnnnnnnnnnnnnnnnnnnnnnnnnnnnnnnnnnnnnnnnnnnnnnnnnnnnnnnnnnnnnnnnnnnnnnnnnnnnnnnnnnnnnnnnnnnnnnnnnnnnnnnnnnnnnnnnnnnnnnnnnnnnnnnnnnnnnnnnnnnnnnnnnnnnnnnnnnnnnnnnnnnnnnnnnnnnnnnnnnnnnnnnnnnnnnnnnnnnnnnnnnnnnnnnnnnnnnnnnnnnnnnnnnnnnnnnnnnnnnnnnnnnnnnnnnnnnnnnnnnnnnnnnnnnnnnnnnnnnnnnnnnnnnnnnnnnnnnnnnnnnnnnnnnnnnnnnnnnnnnnnnnnnnnnnnnnnnnnnnnnnnnnnnnnnnnnnnnnnnnnnnnnnnnnnnnnnnnnnnnnnnnnnnnnnnnnnnnnnnnnnnnnnnnnnnnnnnnnnnnnnnnnnnnnnnnnnnnnnnnnnnnnnnnnnnnnnnnnnnnnnnnnnnnnnnnnnnnnnnnnnnnnnnnnnnnnnnnnnnnnnnnnnnnnnnnnnnnnnnnnnnnnnnnnnnnnnnnnnnnnnnnnnnnnnnnnnnnnnnnnnnnnnnnnnnnnnnnnnnnnnnnnnnnnnnnnnnnnnnnnnnnnnnnnnnnnnnnnnnnnnnnnnnnnnnnnnnnnnnnnnnnnnnnnnnnnnnnnnnnnnnnnnnnnnnnnnnnnnnnnnnnnnnnnnnnnnnnnnnnnnnnnnnnnnnnnnnnnnnnnnnnnnnnnnnnnnnnnnnnnnnnnnnnnnnnnnnnnnnnnnnnnnnnnnnnnnnnnnnnnnnnnnnnnnnnnnnnnnnnnnnnnnnnnnnnnnnnnnnnnnnnnnnnnnnnnnnnnnnnnnnnnnnnnnnnnnnnnnnnnnnnnnnnnnnnnnnnnnnnnnnnnnnnnnnnnnnnnnnnnnnnnnnnnnnnnnnnnnnnnnnnnnnnnnnnnnnnnnnnnnnnnnnnnnnnnnnnnnnnnnnnnnnnnnnnnnnnnnnnnnnnnnnnnnnnnnnnnnnnnnnnnnnnnnnnnnnnnnnnnnnnnnnnnnnnnnnnnnnnnnnnnnnnnnnnnnnnnnnnnnnnnnnnnnnnnnnnnnnnnnnnnnnnnnnnnnnnnnnnnnnnnnnnnnnnnnnnnnnnnnnnnnnnnnnnnnnnnnnnnnnnnnnnnnnnnnnnnnnnnnnnnnnnnnnnnnnnnnnnnnnnnnnnnnnnnnnnnnnnnnnnnnnnnnnnnnnnnnnnnnnnnnnnnnnnnnnnnnnnnnnnnnnnnnnnnnnnnnnnnnnnnnnnnnnnnnnnnnnnnnnnnnnnnnnnnnnnnnnnnnnnnnnnnnnnnnnnnnnnnnnnnnnnnnnnnnnnnnnnnnnnnnnnnnnnnnnnnnnnnnnnnnnnnnnnnnnnnnnnnnnnnnnnnnnnnnnnnnnnnnnnnnnnnnnnnnnnnnnnnnnnnnnnnnnnnnnnnnnnnnnnnnnnnnnnnnnnnnnnnnnnnnnnnnnnnnnnnnnnnnnnnnnnnnnnnnnnnnnnnnnnnnnnnnnnnnnnnnnnnnnnnnnnnnnnnnnnnnnnnnnnnnnnnnnnnnnnnnnnnnnnnnnnnnnnnnnnnnnnnnnnnnnnnnnnnnnnnnnnnnnnnnnnnnnnnnnnnnnnnnnnnnnnnnnnnnnnnnnnnnnnnnnnnnnnnnnnnnnnnnnnnnnnnnnnnnnnnnnnnnnnnnnnnnnnnnnnnnnnnnnnnnnnnnnnnnnnnnnnnnnnnnnnnnnnnnnnnnnnnnnnnnnnnnnnnnnnnnnnnnnnnnnnnnnnnnnnnnnnnnnnnnnnnnnnnnnnnnnnnnnnnnnnnnnnnnnnnnnnnnnnnnnnnnnnnnnnnnnnnnnnnnnnnnnnnnnnnnnnnnnnnnnnnnnnnnnnnnnnnnnnnnnnnnnnnnnnnnnnnnnnnnnnnnnnnnnnnnnnnnnnnnnnnnnnnnnnnnnnnnnnnnnnnnnnnnnnnnnnnnnnnnnnnnnnnnnnnnnnnnnnnnnnnnnnnnnnnnnnnnnnnnnnnnnnnnnnnnnnnnnnnnnnnnnnnnnnnnnnnnnnnnnnnnnnnnnnnnnnnnnnnnnnnnnnnnnnnnnnnnnnnnnnnnnnnnnnnnnnnnnnnnnnnnnnnnnnnnnnnnnnnnnnnnnnnnnnnnnnnnnnnnnnnnnnnnnnnnnnnnnnnnnnnnnnnnnnnnnnnnnnnnnnnnnnnnnnnnnnnnnnnnnnnnnnnnnnnnnnnnnnnnnnnnnnnnnnnnnnnnnnnnnnnnnnnnnnnnnnnnnnnnnnnnnnnnnnnnnnnnnnnnnnnnnnnnnnnnnnnnnnnnnnnnnnnnnnnnnnnnnnnnnnnnnnnnnnnnnnnnnnnnnnnnnnnnnnnnnnnnnnnnnnnnnnnnnnnnnnnnnnnnnnnnnnnnnnnnnnnnnnnnnnnnnnnnnnnnnnnnnnnnnnnnnnnnnnnnnnnnnnnnnnnnnnnnnnnnnnnnnnnnnnnnnnnnnnnnnnnnnnnnnnnnnnnnnnnnnnnnnnnnnnnnnnnnnnnnnnnnnnnnnnnnnnnnnnnnnnnnnnnnnnnnnnnnnnnnnnnnnnnnnnnnnnnnnnnnnnnnnnnnnnnnnnnnnnnnnnnnnnnnnnnnnnnnnnnnnnnnnnnnnnnnnnnnnnnnnnnnnnnnnnnnnnnnnnnnnnnnnnnnnnnnnnnnnnnnnnnnnnnnnnnnnnnnnnnnnnnnnnnnnnnnnnnnnnnnnnnnnnnnnnnnnnnnnnnnnnnnnnnnnnnnnnnnnnnnnnnnnnnnnnnnnnnnnnnnnnnnnnnnnnnnnnnnnnnnnnnnnnnnnnnnnnnnnnnnnnnnnnnnnnnnnnnnnnnnnnnnnnnnnnnnnnnnnnnnnnnnnnnnnnnnnnnnnnnnnnnnnnnnnnnnnnnnnnnnnnnnnnnnnnnnnnnnnnnnnnnnnnnnnnnnnnnnnnnnnnnnnnnnnnnnnnnnnnnnnnnnnnnnnnnnnnnnnnnnnnnnnnnnnnnnnnnnnnnnnnnnnnnnnnnnnnnnnnnnnnnnnnnnnnnnnnnnnnnnnnnnnnnnnnnnnnnnnnnnnnnnnnnnnnnnnnnnnnnnnnnnnnnnnnnnnnnnnnnnnnnnnnnnnnnnnnnnnnnnnnnnnnnnnnnnnnnnnnnnnnnnnnnnnnnnnnnnnnnnnnnnnnnnnnnnnnnnnnnnnnnnnnnnnnnnnnnnnnnnnnnnnnnnnnnnnnnnnnnnnnnnnnnnnnnnnnnnnnnnnnnnnnnnnnnnnnnnnnnnnnnnnnnnnnnnnnnnnnnnnnnnnnnnnnnnnnnnnnnnnnnnnnnnnnnnnnnnnnnnnnnnnnnnnnnnnnnnnnnnnnnnnnnnnnnnnnnnnnnnnnnnnnnnnnnnnnnnnnnnnnnnnnnnnnnnnnnnnnnnnnnnnnnnnnnnnnnnnnnnnnnnnnnnnnnnnnnnnnnnnnnnnnnnnnnnnnnnnnnnnnnnnnnnnnnnnnnnnnnnnnnnnnnnnnnnnnnnnnnnnnnnnnnnnnnnnnnnnnnnnnnnnnnnnnnnnnnnnnnnnnnnnnnnnnnnnnnnnnnnnnnnnnnnnnnnnnnnnnnnnnnnnnnnnnnnnnnnnnnnnnnnnnnnnnnnnnnnnnnnnnnnnnnnnnnnnnnnnnnnnnnnnnnnnnnnnnnnnnnnnnnnnnnnnnnnnnnnnnnnnnnnnnnnnnnnnnnnnnnnnnnnnnnnnnnnnnnnnnnnnnnnnnnnnnnnnnnnnnnnnnnnnnnnnnnnnnnnnnnnnnnnnnnnnnnnnnnnnnnnnnnnnnnnnnnnnnnnnnnnnnnnnnnnnnnnnnnnnnnnnnnnnnnnnnnnnnnnnnnnnnnnnnnnnnnnnnnnnnnnnnnnnnnnnnnnnnnnnnnnnnnnnnnnnnnnnnnnnnnnnnnnnnnnnnnnnnnnnnnnnnnnnnnnnnnnnnnnnnnnnnnnnnnnnnnnnnnnnnnnnnnnnnnnnnnnnnnnnnnnnnnnnnnnnnnnnnnnnnnnnnnnnnnnnnnnnnnnnnnnnnnnnnnnnnnnnnnnnnnnnnnnnnnnnnnnnnnnnnnnnnnnnnnnnnnnnnnnnnnnnnnnnnnnnnnnnnnnnnnnnnnnnnnnnnnnnnnnnnnnnnnnnnnnnnnnnnnnnnnnnnnnnnnnnnnnnnnnnnnnnnnnnnnnnnnnnnnnnnnnnnnnnnnnnnnnnnnnnnnnnnnnnnnnnnnnnnnnnnnnnnnnnnnnnnnnnnnnnnnnnnnnnnnnnnnnnnnnnnnnnnnnnnnnnnnnnnnnnnnnnnnnnnnnnnnnnnnnnnnnnnnnnnnnnnnnnnnnnnnnnnnnnnnnnnnnnnnnnnnnnnnnnnnnnnnnnnnnnnnnnnnnnnnnnnnnnnnnnnnnnnnnnnnnnnnnnnnnnnnnnnnnnnnnnnnnnnnnnnnnnnnnnnnnnnnnnnnnnnnnnnnnnnnnnnnnnnnnnnnnnnnnnnnnnnnnnnnnnnnnnnnnnnnnnnnnnnnnnnnnnnnnnnnnnnnnnnnnnnnnnnnnnnnnnnnnnnnnnnnnnnnnnnnnnnnnnnnnnnnnnnnnnnnnnnnnnnnnnnnnnnnnnnnnnnnnnnnnnnnnnnnnnnnnnnnnnnnnnnnnnnnnnnnnnnnnnnnnnnnnnnnnnnnnnnnnnnnnnnnnnnnnnnnnnnnnnnnnnnnnnnnnnnnnnnnnnnnnnnnnnnnnnnnnnnnnnnnnnnnnnnnnnnnnnnnnnnnnnnnnnnnnnnnnnnnnnnnnnnnnnnnnnnnnnnnnnnnnnnnnnnnnnnnnnnnnnnnnnnnnnnnnnnnnnnnnnnnnnnnnnnnnnnnnnnnnnnnnnnnnnnnnnnnnnnnnnnnnnnnnnnnnnnnnnnnnnnnnnnnnnnnnnnnnnnnnnnnnnnnnnnnnnnnnnnnnnnnnnnnnnnnnnnnnnnnnnnnnnnnnnnnnnnnnnnnnnnnnnnnnnnnnnnnnnnnnnnnnnnnnnnnnnnnnnnnnnnnnnnnnnnnnnnnnnnnnnnnnnnnnnnnnnnnnnnnnnnnnnnnnnnnnnnnnnnnnnnnnnnnnnnnnnnnnnnnnnnnnnnnnnnnnnnnnnnnnnnnnnnnnnnnnnnnnnnnnnnnnnnnnnnnnnnnnnnnnnnnnnnnnnnnnnnnnnnnnnnnnnnnnnnnnnnnnnnnnnnnnnnnnnnnnnnnnnnnnnnnnnnnnnnnnnnnnnnnnnnnnnnnnnnnnnnnnnnnnnnnnnnnnnnnnnnnnnnnnnnnnnnnnnnnnnnnnnnnnnnnnnnnnnnnnnnnnnnnnnnnnnnnnnnnnnnnnnnnnnnnnnnnnnnnnnnnnnnnnnnnnnnnnnnnnnnnnnnnnnnnnnnnnnnnnnnnnnnnnnnnnnnnnnnnnnnnnnnnnnnnnnnnnnnnnnnnnnnnnnnnnnnnnnnnnnnnnnnnnnnnnnnnnnnnnnnnnnnnnnnnnnnnnnnnnnnnnnnnnnnnnnnnnnnnnnnnnnnnnnnnnnnnnnnnnnnnnnnnnnnnnnnnnnnnnnnnnnnnnnnnnnnnnnnnnnnnnnnnnnnnnnnnnnnnnnnnnnnnnnnnnnnnnnnnnnnnnnnnnnnnnnnnnnnnnnnnnnnnnnnnnnnnnnnnnnnnnnnnnnnnnnnnnnnnnnnnnnnnnnnnnnnnnnnnnnnnnnnnnnnnnnnnnnnnnnnnnnnnnnnnnnnnnnnnnnnnnnnnnnnnnnnnnnnnnnnnnnnnnnnnnnnnnnnnnnnnnnnnnnnnnnnnnnnnnnnnnnnnnnnnnnnnnnnnnnnnnnnnnnnnnnnnnnnnnnnnnnnnnnnnnnnnnnnnnnnnnnnnnnnnnnnnnnnnnnnnnnnnnnnnnnnnnnnnnnnnnnnnnnnnnnnnnnnnnnnnnnnnnnnnnnnnnnnnnnnnnnnnnnnnnnnnnnnnnnnnnnnnnnnnnnnnnnnnnnnnnnnnnnnnnnnnnnnnnnnnnnnnnnnnnnnnnnnnnnnnnnnnnnnnnnnnnnnnnnnnnnnnnnnnnnnnnnnnnnnnnnnnnnnnnnnnnnnnnnnnnnnnnnnnnnnnnnnnnnnnnnnnnnnnnnnnnnnnnnnnnnnnnnnnnnnnnnnnnnnnnnnnnnnnnnnnnnnnnnnnnnnnnnnnnnnnnnnnnnnnnnnnnnnnnnnnnnnnnnnnnnnnnnnnnnnnnnnnnnnnnnnnnnnnnnnnnnnnnnnnnnnnnnnnnnnnnnnnnnnnnnnnnnnnnnnnnnnnnnnnnnnnnnnnnnnnnnnnnnnnnnnnnnnnnnnnnnnnnnnnnnnnnnnnnnnnnnnnnnnnnnnnnnnnnnnnnnnnnnnnnnnnnnnnnnnnnnnnnnnnnnnnnnnnnnnnnnnnnnnnnnnnnnnnnnnnnnnnnnnnnnnnnnnnnnnnnnnnnnnnnnnnnnnnnnnnnnnnnnnnnnnnnnnnnnnnnnnnnnnnnnnnnnnnnnnnnnnnnnnnnnnnnnnnnnnnnnnnnnnnnnnnnnnnnnnnnnnnnnnnnnnnnnnnnnnnnnnnnnnnnnnnnnnnnnnnnnnnnnnnnnnnnnnnnnnnnnnnnnnnnnnnnnnnnnnnnnnnnnnnnnnnnnnnnnnnnnnnnnnnnnnnnnnnnnnnnnnnnnnnnnnnnnnnnnnnnnnnnnnnnnnnnnnnnnnnnnnnnnnnnnnnnnnnnnnnnnnnnnnnnnnnnnnnnnnnnnnnnnnnnnnnnnnnnnnnnnnnnnnnnnnnnnnnnnnnnnnnnnnnnnnnnnnnnnnnnnnnnnnnnnnnnnnnnnnnnnnnnnnnnnnnnnnnnnnnnnnnnnnnnnnnnnnnnnnnnnnnnnnnnnnnnnnnnnnnnnnnnnnnnnnnnnnnnnnnnnnnnnnnnnnnnnnnnnnnnnnnnnnnnnnnnnnnnnnnnnnnnnnnnnnnnnnnnnnnnnnnnnnnnnnnnnnnnnnnnnnnnnnnnnnnnnnnnnnnnnnnnnnnnnnnnnnnnnnnnnnnnnnnnnnnnnnnnnnnnnnnnnnnnnnnnnnnnnnnnnnnnnnnnnnnnnnnnnnnnnnnnnnnnnnnnnnnnnnnnnnnnnnnnnnnnnnnnnnnnnnnnnnnnnnnnnnnnnnnnnnnnnnnnnnnnnnnnnnnnnnnnnnnnnnnnnnnnnnnnnnnnnnnnnnnnnnnnnnnnnnnnnnnnnnnnnnnnnnnnnnnnnnnnnnnnnnnnnnnnnnnnnnnnnnnnnnnnnnnnnnnnnnnnnnnnnnnnnnnnnnnnnnnnnnnnnnnnnnnnnnnnnnnnnnnnnnnnnnnnnnnnnnnnnnnnnnnnnnnnnnnnnnnnnnnnnnnnnnnnnnnnnnnnnnnnnnnnnnnnnnnnnnnnnnnnnnnnnnnnnnnnnnnnnnnnnnnnnnnnnnnnnnnnnnnnnnnnnnnnnnnnnnnnnnnnnnnnnnnnnnnnnnnnnnnnnnnnnnnnnnnnnnnnnnnnnnnnnnnnnnnnnnnnnnnnnnnnnnnnnnnnnnnnnnnnnnnnnnnnnnnnnnnnnnnnnnnnnnnnnnnnnnnnnnnnnnnnnnnnnnnnnnnnnnnnnnnnnnnnnnnnnnnnnnnnnnnnnnnnnnnnnnnnnnnnnnnnnnnnnnnnnnnnnnnnnnnnnnnnnnnnnnnnnnnnnnnnnnnnnnnnnnnnnnnnnnnnnnnnnnnnnnnnnnnnnnnnnnnnnnnnnnnnnnnnnnnnnnnnnnnnnnnnnnnnnnnnnnnnnnnnnnnnnnnnnnnnnnnnnnnnnnnnnnnnnnnnnnnnnnnnnnnnnnnnnnnnnnnnnnnnnnnnnnnnnnnnnnnnnnnnnnnnnnnnnnnnnnnnnnnnnnnnnnnnnnnnnnnnnnnnnnnnnnnnnnnnnnnnnnnnnnnnnnnnnnnnnnnnnnnnnnnnnnnnnnnnnnnnnnnnnnnnnnnnnnnnnnnnnnnnnnnnnnnnnnnnnnnnnnnnnnnnnnnnnnnnnnnnnnnnnnnnnnnnnnnnnnnnnnnnnnnnnnnnnnnnnnnnnnnnnnnnnnnnnnnnnnnnnnnnnnnnnnnnnnnnnnnnnnnnnnnnnnnnnnnnnnnnnnnnnnnnnnnnnnnnnnnnnnnnnnnnnnnnnnnnnnnnnnnnnnnnnnnnnnnnnnnnnnnnnnnnnnnnnnnnnnnnnnnnnnnnnnnnnnnnnnnnnnnnnnnnnnnnnnnnnnnnnnnnnnnnnnnnnnnnnnnnnnnnnnnnnnnnnnnnnnnnnnnnnnnnnnnnnnnnnnnnnnnnnnnnnnnnnnnnnnnnnnnnnnnnnnnnnnnnnnnnnnnnnnnnnnnnnnnnnnnnnnnnnnnnnnnnnnnnnnnnnnnnnnnnnnnnnnnnnnnnnnnnnnnnnnnnnnnnnnnnnnnnnnnnnnnnnnnnnnnnnnnnnnnnnnnnnnnnnnnnnnnnnnnnnnnnnnnnnnnnnnnnnnnnnnnnnnnnnnnnnnnnnnnnnnnnnnnnnnnnnnnnnnnnnnnnnnnnnnnnnnnnnnnnnnnnnnnnnnnnnnnnnnnnnnnnnnnnnnnnnnnnnnnnnnnnnnnnnnnnnnnnnnnnnnnnnnnnnnnnnnnnnnnnnnnnnnnnnnnnnnnnnnnnnnnnnnnnnnnnnnnnnnnnnnnnnnnnnnnnnnnnnnnnnnnnnnnnnnnnnnnnnnnnnnnnnnnnnnnnnnnnnnnnnnnnnnnnnnnnnnnnnnnnnnnnnnnnnnnnnnnnnnnnnnnnnnnnnnnnnnnnnnnnnnnnnnnnnnnnnnnnnnnnnnnnnnnnnnnnnnnnnnnnnnnnnnnnnnnnnnnnnnnnnnnnnnnnnnnnnnnnnnnnnnnnnnnnnnnnnnnnnnnnnnnnnnnnnnnnnnnnnnnnnnnnnnnnnnnnnnnnnnnnnnnnnnnnnnnnnnnnnnnnnnnnnnnnnnnnnnnnnnnnnnnnnnnnnnnnnnnnnnnnnnnnnnnnnnnnnnnnnnnnnnnnnnnnnnnnnnnnnnnnnnnnnnnnnnnnnnnnnnnnnnnnnnnnnnnnnnnnnnnnnnnnnnnnnnnnnnnnnnnnnnnnnnnnnnnnnnnnnnnnnnnnnnnnnnnnnnnnnnnnnnnnnnnnnnnnnnnnnnnnnnnnnnnnnnnnnnnnnnnnnnnnnnnnnnnnnnnnnnnnnnnnnnnnnnnnnnnnnnnnnnnnnnnnnnnnnnnnnnnnnnnnnnnnnnnnnnnnnnnnnnnnnnnnnnnnnnnnnnnnnnnnnnnnnnnnnnnnnnnnnnnnnnnnnnnnnnnnnnnnnnnnnnnnnnnnnnnnnnnnnnnnnnnnnnnnnnnnnnnnnnnnnnnnnnnnnnnnnnnnnnnnnnnnnnnnnnnnnnnnnnnnnnnnnnnnnnnnnnnnnnnnnnnnnnnnnnnnnnnnnnnnnnnnnnnnnnnnnnnnnnnnnnnnnnnnnnnnnnnnnnnnnnnnnnnnnnnnnnnnnnnnnnnnnnnnnnnnnnnnnnnnnnnnnnnnnnnnnnnnnnnnnnnnnnnnnnnnnnnnnnnnnnnnnnnnnnnnnnnnnnnnnnnnnnnnnnnnnnnnnnnnnnnnnnnnnnnnnnnnnnnnnnnnnnnnnnnnnnnnnnnnnnnnnnnnnnnnnnnnnnnnnnnnnnnnnnnnnnnnnnnnnnnnnnnnnnnnnnnnnnnnnnnnnnnnnnnnnnnnnnnnnnnnnnnnnnnnnnnnnnnnnnnnnnnnnnnnnnnnnnnnnnnnnnnnnnnnnnnnnnnnnnnnnnnnnnnnnnnnnnnnnnnnnnnnnnnnnnnnnnnnnnnnnnnnnnnnnnnnnnnnnnnnnnnnnnnnnnnnnnnnnnnnnnnnnnnnnnnnnnnnnnnnnnnnnnnnnnnnnnnnnnnnnnnnnnnnnnnnnnnnnnnnnnnnnnnnnnnnnnnnnnnnnnnnnnnnnnnnnnnnnnnnnnnnnnnnnnnnnnnnnnnnnnnnnnnnnnnnnnnnnnnnnnnnnnnnnnnnnnnnnnnnnnnnnnnnnnnnnnnnnnnnnnnnnnnnnnnnnnnnnnnnnnnnnnnnnnnnnnnnnnnnnnnnnnnnnnnnnnnnnnnnnnnnnnnnnnnnnnnnnnnnnnnnnnnnnnnnnnnnnnnnnnnnnnnnnnnnnnnnnnnnnnnnnnnnnnnnnnnnnnnnnnnnnnnnnnnnnnnnnnnnnnnnnnnnnnnnnnnnnnnnnnnnnnnnnnnnnnnnnnnnnnnnnnnnnnnnnnnnnnnnnnnnnnnnnnnnnnnnnnnnnnnnnnnnnnnnnnnnnnnnnnnnnnnnnnnnnnnnnnnnnnnnnnnnnnnnnnnnnnnnnnnnnnnnnnnnnnnnnnnnnnnnnnnnnnnnnnnnnnnnnnnnnnnnnnnnnnnnnnnnnnnnnnnnnnnnnnnnnnnnnnnnnnnnnnnnnnnnnnnnnnnnnnnnnnnnnnnnnnnnnnnnnnnnnnnnnnnnnnnnnnnnnnnnnnnnnnnnnnnnnnnnnnnnnnnnnnnnnnnnnnnnnnnnnnnnnnnnnnnnnnnnnnnnnnnnnnnnnnnnnnnnnnnnnnnnnnnnnnnnnnnnnnnnnnnnnnnnnnnnnnnnnnnnnnnnnnnnnnnnnnnnnnnnnnnnnnnnnnnnnnnnnnnnnnnnnnnnnnnnnnnnnnnnnnnnnnnnnnnnnnnnnnnnnnnnnnnnnnnnnnnnnnnnnnnnnnnnnnnnnnnnnnnnnnnnnnnnnnnnnnnnnnnnnnnnnnnnnnnnnnnnnnnnnnnnnnnnnnnnnnnnnnnnnnnnnnnnnnnnnnnnnnnnnnnnnnnnnnnnnnnnnnnnnnnnnnnnnnnnnnnnnnnnnnnnnnnnnnnnnnnnnnnnnnnnnnnnnnnnnnnnnnnnnnnnnnnnnnnnnnnnnnnnnnnnnnnnnnnnnnnnnnnnnnnnnnnnnnnnnnnnnnnnnnnnnnnnnnnnnnnnnnnnnnnnnnnnnnnnnnnnnnnnnnnnnnnnnnnnnnnnnnnnnnnnnnnnnnnnnnnnnnnnnnnnnnnnnnnnnnnnnnnnnnnnnnnnnnnnnnnnnnnnnnnnnnnnnnnnnnnnnnnnnnnnnnnnnnnnnnnnnnnnnnnnnnnnnnnnnnnnnnnnnnnnnnnnnnnnnnnnnnnnnnnnnnnnnnnnnnnnnnnnnnnnnnnnnnnnnnnnnnnnnnnnnnnnnnnnnnnnnnnnnnnnnnnnnnnnnnnnnnnnnnnnnnnnnnnnnnnnnnnnnnnnnnnnnnnnnnnnnnnnnnnnnnnnnnnnnnnnnnnnnnnnnnnnnnnnnnnnnnnnnnnnnnnnnnnnnnnnnnnnnnnnnnnnnnnnnnnnnnnnnnnnnnnnnnnnnnnnnnnnnnnnnnnnnnnnnnnnnnnnnnnnnnnnnnnnnnnnnnnnnnnnnnnnnnnnnnnnnnnnnnnnnnnnnnnnnnnnnnnnnnnnnnnnnnnnnnnnnnnnnnnnnnnnnnnnnnnnnnnnnnnnnnnnnnnnnnnnnnnnnnnnnnnnnnnnnnnnnnnnnnnnnnnnnnnnnnnnnnnnnnnnnnnnnnnnnnnnnnnnnnnnnnnnnnnnnnnnnnnnnnnnnnnnnnnnnnnnnnnnnnnnnnnnnnnnnnnnnnnnnnnnnnnnnnnnnnnnnnnnnnnnnnnnnnnnnnnnnnnnnnnnnnnnnnnnnnnnnnnnnnnnnnnnnnnnnnnnnnnnnnnnnnnnnnnnnnnnnnnnnnnnnnnnnnnnnnnnnnnnnnnnnnnnnnnnnnnnnnnnnnnnnnnnnnnnnnnnnnnnnnnnnnnnnnnnnnnnnnnnnnnnnnnnnnnnnnnnnnnnnnnnnnnnnnnnnnnnnnnnnnnnnnnnnnnnnnnnnnnnnnnnnnnnnnnnnnnnnnnnnnnnnnnnnnnnnnnnnnnnnnnnnnnnnnnnnnnnnnnnnnnnnnnnnnnnnnnnnnnnnnnnnnnnnnnnnnnnnnnnnnnnnnnnnnnnnnnnnnnnnnnnnnnnnnnnnnnnnnnnnnnnnnnnnnnnnnnnnnnnnnnnnnnnnnnnnnnnnnnnnnnnnnnnnnnnnnnnnnnnnnnnnnnnnnnnnnnnnnnnnnnnnnnnnnnnnnnnnnnnnnnnnnnnnnnnnnnnnnnnnnnnnnnnnnnnnnnnnnnnnnnnnnnnnnnnnnnnnnnnnnnnnnnnnnnnnnnnnnnnnnnnnnnnnnnnnnnnnnnnnnnnnnnnnnnnnnnnnnnnnnnnnnnnnnnnnnnnnnnnnnnnnnnnnnnnnnnnnnnnnnnnnnnnnnnnnnnnnnnnnnnnnnnnnnnnnnnnnnnnnnnnnnnnnnnnnnnnnnnnnnnnnnnnnnnnnnnnnnnnnnnnnnnnnnnnnnnnnnnnnnnnnnnnnnnnnnnnnnnnnnnnnnnnnnnnnnnnnnnnnnnnnnnnnnnnnnnnnnnnnnnnnnnnnnnnnnnnnnnnnnnnnnnnnnnnnnnnnnnnnnnnnnnnnnnnnnnnnnnnnnnnnnnnnnnnnnnnnnnnnnnnnnnnnnnnnnnnnnnnnnnnnnnnnnnnnnnnnnnnnnnnnnnnnnnnnnnnnnnnnnnnnnnnnnnnnnnnnnnnnnnnnnnnnnnnnnnnnnnnnnnnnnnnnnnnnnnnnnnnnnnnnnnnnnnnnnnnnnnnnnnnnnnnnnnnnnnnnnnnnnnnnnnnnnnnnnnnnnnnnnnnnnnnnnnnnnnnnnnnnnnnnnnnnnnnnnnnnnnnnnnnnnnnnnnnnnnnnnnnnnnnnnnnnnnnnnnnnnnnnnnnnnnnnnnnnnnnnnnnnnnnnnnnnnnnnnnnnnnnnnnnnnnnnnnnnnnnnnnnnnnnnnnnnnnnnnnnnnnnnnnnnnnnnnnnnnnnnnnnnnnnnnnnnnnnnnnnnnnnnnnnnnnnnnnnnnnnnnnnnnnnnnnnnnnnnnnnnnnnnnnnnnnnnnnnnnnnnnnnnnnnnnnnnnnnnnnnnnnnnnnnnnnnnnnnnnnnnnnnnnnnnnnnnnnnnnnnnnnnnnnnnnnnnnnnnnnnnnnnnnnnnnnnnnnnnnnnnnnnnnnnnnnnnnnnnnnnnnnnnnnnnnnnnnnnnnnnnnnnnnnnnnnnnnnnnnnnnnnnnnnnnnnnnnnnnnnnnnnnnnnnnnnnnnnnnnnnnnnnnnnnnnnnnnnnnnnnnnnnnnnnnnnnnnnnnnnnnnnnnnnnnnnnnnnnnnnnnnnnnnnnnnnnnnnnnnnnnnnnnnnnnnnnnnnnnnnnnnnnnnnnnnnnnnnnnnnnnnnnnnnnnnnnnnnnnnnnnnnnnnnnnnnnnnnnnnnnnnnnnnnnnnnnnnnnnnnnnnnnnnnnnnnnnnnnnnnnnnnnnnnnnnnnnnnnnnnnnnnnnnnnnnnnnnnnnnnnnnnnnnnnnnnnnnnnnnnnnnnnnnnnnnnnnnnnnnnnnnnnnnnnnnnnnnnnnnnnnnnnnnnnnnnnnnnnnnnnnnnnnnnnnnnnnnnnnnnnnnnnnnnnnnnnnnnnnnnnnnnnnnnnnnnnnnnnnnnnnnnnnnnnnnnnnnnnnnnnnnnnnnnnnnnnnnnnnnnnnnnnnnnnnnnnnnnnnnnnnnnnnnnnnnnnnnnnnnnnnnnnnnnnnnnnnnnnnnnnnnnnnnnnnnnnnnnnnnnnnnnnnnnnnnnnnnnnnnnnnnnnnnnnnnnnnnnnnnnnnnnnnnnnnnnnnnnnnnnnnnnnnnnnnnnnnnnnnnnnnnnnnnnnnnnnnnnnnnnnnnnnnnnnnnnnnnnnnnnnnnnnnnnnnnnnnnnnnnnnnnnnnnnnnnnnnnnnnnnnnnnnnnnnnnnnnnnnnnnnnnnnnnnnnnnnnnnnnnnnnnnnnnnnnnnnnnnnnnnnnnnnnnnnnnnnnnnnnnnnnnnnnnnnnnnnnnnnnnnnnnnnnnnnnnnnnnnnnnnnnnnnnnnnnnnnnnnnnnnnnnnnnnnnnnnnnnnnnnnnnnnnnnnnnnnnnnnnnnnnnnnnnnnnnnnnnnnnnnnnnnnnnnnnnnnnnnnnnnnnnnnnnnnnnnnnnnnnnnnnnnnnnnnnnnnnnnnnnnnnnnnnnnnnnnnnnnnnnnnnnnnnnnnnnnnnnnnnnnnnnnnnnnnnnnnnnnnnnnnnnnnnnnnnnnnnnnnnnnnnnnnnnnnnnnnnnnnnnnnnnnnnnnnnnnnnnnnnnnnnnnnnnnnnnnnnnnnnnnnnnnnnnnnnnnnnnnnnnnnnnnnnnnnnnnnnnnnnnnnnnnnnnnnnnnnnnnnnnnnnnnnnnnnnnnnnnnnnnnnnnnnnnnnnnnnnnnnnnnnnnnnnnnnnnnnnnnnnnnnnnnnnnnnnnnnnnnnnnnnnnnnnnnnnnnnnnnnnnnnnnnnnnnnnnnnnnnnnnnnnnnnnnnnnnnnnnnnnnnnnnnnnnnnnnnnnnnnnnnnnnnnnnnnnnnnnnnnnnnnnnnnnnnnnnnnnnnnnnnnnnnnnnnnnnnnnnnnnnnnnnnnnnnnnnnnnnnnnnnnnnnnnnnnnnnnnnnnnnnnnnnnnnnnnnnnnnnnnnnnnnnnnnnnnnnnnnnnnnnnnnnnnnnnnnnnnnnnnnnnnnnnnnnnnnnnnnnnnnnnnnnnnnnnnnnnnnnnnnnnnnnnnnnnnnnnnnnnnnnnnnnnnnnnnnnnnnnnnnnnnnnnnnnnnnnnnnnnnnnnnnnnnnnnnnnnnnnnnnnnnnnnnnnnnnnnnnnnnnnnnnnnnnnnnnnnnnnnnnnnnnnnnnnnnnnnnnnnnnnnnnnnnnnnnnnnnnnnnnnnnnnnnnnnnnnnnnnnnnnnnnnnnnnnnnnnnnnnnnnnnnnnnnnnnnnnnnnnnnnnnnnnnnnnnnnnnnnnnnnnnnnnnnnnnnnnnnnnnnnnnnnnnnnnnnnnnnnnnnnnnnnnnnnnnnnnnnnnnnnnnnnnnnnnnnnnnnnnnnnnnnnnnnnnnnnnnnnnnnnnnnnnnnnnnnnnnnnnnnnnnnnnnnnnnnnnnnnnnnnnnnnnnnnnnnnnnnnnnnnnnnnnnnnnnnnnnnnnnnnnnnnnnnnnnnnnnnnnnnnnnnnnnnnnnnnnnnnnnnnnnnnnnnnnnnnnnnnnnnnnnnnnnnnnnnnnnnnnnnnnnnnnnnnnnnnnnnnnnnnnnnnnnnnnnnnnnnnnnnnnnnnnnnnnnnnnnnnnnnnnnnnnnnnnnnnnnnnnnnnnnnnnnnnnnnnnnnnnnnnnnnnnnnnnnnnnnnnnnnnnnnnnnnnnnnnnnnnnnnnnnnnnnnnnnnnnnnnnnnnnnnnnnnnnnnnnnnnnnnnnnnnnnnnnnnnnnnnnnnnnnnnnnnnnnnnnnnnnnnnnnnnnnnnnnnnnnnnnnnnnnnnnnnnnnnnnnnnnnnnnnnnnnnnnnnnnnnnnnnnnnnnnnnnnnnnnnnnnnnnnnnnnnnnnnnnnnnnnnnnnnnnnnnnnnnnnnnnnnnnnnnnnnnnnnnnnnnnnnnnnnnnnnnnnnnnnnnnnnnnnnnnnnnnnnnnnnnnnnnnnnnnnnnnnnnnnnnnnnnnnnnnnnnnnnnnnnnnnnnnnnnnnnnnnnnnnnnnnnnnnnnnnnnnnnnnnnnnnnnnnnnnnnnnnnnnnnnnnnnnnnnnnnnnnnnnnnnnnnnnnnnnnnnnnnnnnnnnnnnnnnnnnnnnnnnnnnnnnnnnnnnnnnnnnnnnnnnnnnnnnnnnnnnnnnnnnnnnnnnnnnnnnnnnnnnnnnnnnnnnnnnnnnnnnnnnnnnnnnnnnnnnnnnnnnnnnnnnnnnnnnnnnnnnnnnnnnnnnnnnnnnnnnnnnnnnnnnnnnnnnnnnnnnnnnnnnnnnnnnnnnnnnnnnnnnnnnnnnnnnnnnnnnnnnnnnnnnnnnnnnnnnnnnnnnnnnnnnnnnnnnnnnnnnnnnnnnnnnnnnnnnnnnnnnnnnnnnnnnnnnnnnnnnnnnnnnnnnnnnnnnnnnnnnnnnnnnnnnnnnnnnnnnnnnnnnnnnnnnnnnnnnnnnnnnnnnnnnnnnnnnnnnnnnnnnnnnnnnnnnnnnnnnnnnnnnnnnnnnnnnnnnnnnnnnnnnnnnnnnnnnnnnnnnnnnnnnnnnnnnnnnnnnnnnnnnnnnnnnnnnnnnnnnnnnnnnnnnnnnnnnnnnnnnnnnnnnnnnnnnnnnnnnnnnnnnnnnnnnnnnnnnnnnnnnnnnnnnnnnnnnnnnnnnnnnnnnnnnnnnnnnnnnnnnnnnnnnnnnnnnnnnnnnnnnnnnnnnnnnnnnnnnnnnnnnnnnnnnnnnnnnnnnnnnnnnnnnnnnnnnnnnnnnnnnnnnnnnnnnnnnnnnnnnnnnnnnnnnnnnnnnnnnnnnnnnnnnnnnnnnnnnnnnnnnnnnnnnnnnnnnnnnnnnnnnnnnnnnnnnnnnnnnnnnnnnnnnnnnnnnnnnnnnnnnnnnnnnnnnnnnnnnnnnnnnnnnnnnnnnnnnnnnnnnnnnnnnnnnnnnnnnnnnnnnnnnnnnnnnnnnnnnnnnnnnnnnnnnnnnnnnnnnnnnnnnnnnnnnnnnnnnnnnnnnnnnnnnnnnnnnnnnnnnnnnnnnnnnnnnnnnnnnnnnnnnnnnnnnnnnnnnnnnnnnnnnnnnnnnnnnnnnnnnnnnnnnnnnnnnnnnnnnnnnnnnnnnnnnnnnnnnnnnnnnnnnnnnnnnnnnnnnnnnnnnnnnnnnnnnnnnnnnnnnnnnnnnnnnnnnnnnnnnnnnnnnnnnnnnnnnnnnnnnnnnnnnnnnnnnnnnnnnnnnnnnnnnnnnnnnnnnnnnnnnnnnnnnnnnnnnnnnnnnnnnnnnnnnnnnnnnnnnnnnnnnnnnnnnnnnnnnnnnnnnnnnnnnnnnnnnnnnnnnnnnnnnnnnnnnnnnnnnnnnnnnnnnnnnnnnnnnnnnnnnnnnnnnnnnnnnnnnnnnnnnnnnnnnnnnnnnnnnnnnnnnnnnnnnnnnnnnnnnnnnnnnnnnnnnnnnnnnnnnnnnnnnnnnnnnnnnnnnnnnnnnnnnnnnnnnnnnnnnnnnnnnnnnnnnnnnnnnnnnnnnnnnnnnnnnnnnnnnnnnnnnnnnnnnnnnnnnnnnnnnnnnnnnnnnnnnnnnnnnnnnnnnnnnnnnnnnnnnnnnnnnnnnnnnnnnnnnnnnnnnnnnnnnnnnnnnnnnnnnnnnnnnnnnnnnnnnnnnnnnnnnnnnnnnnnnnnnnnnnnnnnnnnnnnnnnnnnnnnnnnnnnnnnnnnnnnnnnnnnnnnnnnnnnnnnnnnnnnnnnnnnnnnnnnnnnnnnnnnnnnnnnnnnnnnnnnnnnnnnnnnnnnnnnnnnnnnnnnnnnnnnnnnnnnnnnnnnnnnnnnnnnnnnnnnnnnnnnnnnnnnnnnnnnnnnnnnnnnnnnnnnnnnnnnnnnnnnnnnnnnnnnnnnnnnnnnnnnnnnnnnnnnnnnnnnnnnnnnnnnnnnnnnnnnnnnnnnnnnnnnnnnnnnnnnnnnnnnnnnnnnnnnnnnnnnnnnnnnnnnnnnnnnnnnnnnnnnnnnnnnnnnnnnnnnnnnnnnnnnnnnnnnnnnnnnnnnnnnnnnnnnnnnnnnnnnnnnnnnnnnnnnnnnnnnnnnnnnnnnnnnnnnnnnnnnnnnnnnnnnnnnnnnnnnnnnnnnnnnnnnnnnnnnnnnnnnnnnnnnnnnnnnnnnnnnnnnnnnnnnnnnnnnnnnnnnnnnnnnnnnnnnnnnnnnnnnnnnnnnnnnnnnnnnnnnnnnnnnnnnnnnnnnnnnnnnnnnnnnnnnnnnnnnnnnnnnnnnnnnnnnnnnnnnnnnnnnnnnnnnnnnnnnnnnnnnnnnnnnnnnnnnnnnnnnnnnnnnnnnnnnnnnnnnnnnnnnnnnnnnnnnnnnnnnnnnnnnnnnnnnnnnnnnnnnnnnnnnnnnnnnnnnnnnnnnnnnnnnnnnnnnnnnnnnnnnnnnnnnnnnnnnnnnnnnnnnnnnnnnnnnnnnnnnnnnnnnnnnnnnnnnnnnnnnnnnnnnnnnnnnnnnnnnnnnnnnnnnnnnnnnnnnnnnnnnnnnnnnnnnnnnnnnnnnnnnnnnnnnnnnnnnnnnnnnnnnnnnnnnnnnnnnnnnnnnnnnnnnnnnnnnnnnnnnnnnnnnnnnnnnnnnnnnnnnnnnnnnnnnnnnnnnnnnnnnnnnnnnnnnnnnnnnnnnnnnnnnnnnnnnnnnnnnnnnnnnnnnnnnnnnnnnnnnnnnnnnnnnnnnnnnnnnnnnnnnnnnnnnnnnnnnnnnnnnnnnnnnnnnnnnnnnnnnnnnnnnnnnnnnnnnnnnnnnnnnnnnnnnnnnnnnnnnnnnnnnnnnnnnnnnnnnnnnnnnnnnnnnnnnnnnnnnnnnnnnnnnnnnnnnnnnnnnnnnnnnnnnnnnnnnnnnnnnnnnnnnnnnnnnnnnnnnnnnnnnnnnnnnnnnnnnnnnnnnnnnnnnnnnnnnnnnnnnnnnnnnnnnnnnnnnnnnnnnnnnnnnnnnnnnnnnnnnnnnnnnnnnnnnnnnnnnnnnnnnnnnnnnnnnnnnnnnnnnnnnnnnnnnnnnnnnnnnnnnnnnnnnnnnnnnnnnnnnnnnnnnnnnnnnnnnnnnnnnnnnnnnnnnnnnnnnnnnnnnnnnnnnnnnnnnnnnnnnnnnnnnnnnnnnnnnnnnnnnnnnnnnnnnnnnnnnnnnnnnnnnnnnnnnnnnnnnnnnnnnnnnnnnnnnnnnnnnnnnnnnnnnnnnnnnnnnnnnnnnnnnnnnnnnnnnnnnnnnnnnnnnnnnnnnnnnnnnnnnnnnnnnnnnnnnnnnnnnnnnnnnnnnnnnnnnnnnnnnnnnnnnnnnnnnnnnnnnnnnnnnnnnnnnnnnnnnnnnnnnnnnnnnnnnnnnnnnnnnnnnnnnnnnnnnnnnnnnnnnnnnnnnnnnnnnnnnnnnnnnnnnnnnnnnnnnnnnnnnnnnnnnnnnnnnnnnnnnnnnnnnnnnnnnnnnnnnnnnnnnnnnnnnnnnnnnnnnnnnnnnnnnnnnnnnnnnnnnnnnnnnnnnnnnnnnnnnnnnnnnnnnnnnnnnnnnnnnnnnnnnnnnnnnnnnnnnnnnnnnnnnnnnnnnnnnnnnnnnnnnnnnnnnnnnnnnnnnnnnnnnnnnnnnnnnnnnnnnnnnnnnnnnnnnnnnnnnnnnnnnnnnnnnnnnnnnnnnnnnnnnnnnnnnnnnnnnnnnnnnnnnnnnnnnnnnnnnnnnnnnnnnnnnnnnnnnnnnnnnnnnnnnnnnnnnnnnnnnnnnnnnnnnnnnnnnnnnnnnnnnnnnnnnnnnnnnnnnnnnnnnnnnnnnnnnnnnnnnnnnnnnnnnnnnnnnnnnnnnnnnnnnnnnnnnnnnnnnnnnnnnnnnnnnnnnnnnnnnnnnnnnnnnnnnnnnnnnnnnnnnnnnnnnnnnnnnnnnnnnnnnnnnnnnnnnnnnnnnnnnnnnnnnnnnnnnnnnnnnnnnnnnnnnnnnnnnnnnnnnnnnnnnnnnnnnnnnnnnnnnnnnnnnnnnnnnnnnnnnnnnnnnnnnnnnnnnnnnnnnnnnnnnnnnnnnnnnnnnnnnnnnnnnnnnnnnnnnnnnnnnnnnnnnnnnnnnnnnnnnnnnnnnnnnnnnnnnnnnnnnnnnnnnnnnnnnnnnnnnnnnnnnnnnnnnnnnnnnnnnnnnnnnnnnnnnnnnnnnnnnnnnnnnnnnnnnnnnnnnnnnnnnnnnnnnnnnnnnnnnnnnnnnnnnnnnnnnnnnnnnnnnnnnnnnnnnnnnnnnnnnnnnnnnnnnnnnnnnnnnnnnnnnnnnnnnnnnnnnnnnnnnnnnnnnnnnnnnnnnnnnnnnnnnnnnnnnnnnnnnnnnnnnnnnnnnnnnnnnnnnnnnnnnnnnnnnnnnnnnnnnnnnnnnnnnnnnnnnnnnnnnnnnnnnnnnnnnnnnnnnnnnnnnnnnnnnnnnnnnnnnnnnnnnnnnnnnnnnnnnnnnnnnnnnnnnnnnnnnnnnnnnnnnnnnnnnnnnnnnnnnnnnnnnnnnnnnnnnnnnnnnnnnnnnnnnnnnnnnnnnnnnnnnnnnnnnnnnnnnnnnnnnnnnnnnnnnnnnnnnnnnnnnnnnnnnnnnnnnnnnnnnnnnnnnnnnnnnnnnnnnnnnnnnnnnnnnnnnnnnnnnnnnnnnnnnnnnnnnnnnnnnnnnnnnnnnnnnnnnnnnnnnnnnnnnnnnnnnnnnnnnnnnnnnnnnnnnnnnnnnnnnnnnnnnnnnnnnnnnnnnnnnnnnnnnnnnnnnnnnnnnnnnnnnnnnnnnnnnnnnnnnnnnnnnnnnnnnnnnnnnnnnnnnnnnnnnnnnnnnnnnnnnnnnnnnnnnnnnnnnnnnnnnnnnnnnnnnnnnnnnnnnnnnnnnnnnnnnnnnnnnnnnnnnnnnnnnnnnnnnnnnnnnnnnnnnnnnnnnnnnnnnnnnnnnnnnnnnnnnnnnnnnnnnnnnnnnnnnnnnnnnnnnnnnnnnnnnnnnnnnnnnnnnnnnnnnnnnnnnnnnnnnnnnnnnnnnnnnnnnnnnnnnnnnnnnnnnnnnnnnnnnnnnnnnnnnnnnnnnnnnnnnnnnnnnnnnnnnnnnnnnnnnnnnnnnnnnnnnnnnnnnnnnnnnnnnnnnnnnnnnnnnnnnnnnnnnnnnnnnnnnnnnnnnnnnnnnnnnnnnnnnnnnnnnnnnnnnnnnnnnnnnnnnnnnnnnnnnnnnnnnnnnnnnnnnnnnnnnnnnnnnnnnnnnnnnnnnnnnnnnnnnnnnnnnnnnnnnnnnnnnnnnnnnnnnnnnnnnnnnnnnnnnnnnnnnnnnnnnnnnnnnnnnnnnnnnnnnnnnnnnnnnnnnnnnnnnnnnnnnnnnnnnnnnnnnnnnnnnnnnnnnnnnnnnnnnnnnnnnnnnnnnnnnnnnnnnnnnnnnnnnnnnnnnnnnnnnnnnnnnnnnnnnnnnnnnnnnnnnnnnnnnnnnnnnnnnnnnnnnnnnnnnnnnnnnnnnnnnnnnnnnnnnnnnnnnnnnnnnnnnnnnnnnnnnnnnnnnnnnnnnnnnnnnnnnnnnnnnnnnnnnnnnnnnnnnnnnnnnnnnnnnnnnnnnnnnnnnnnnnnnnnnnnnnnnnnnnnnnnnnnnnnnnnnnnnnnnnnnnnnnnnnnnnnnnnnnnnnnnnnnnnnnnnnnnnnnnnnnnnnnnnnnnnnnnnnnnnnnnnnnnnnnnnnnnnnnnnnnnnnnnnnnnnnnnnnnnnnnnnnnnnnnnnnnnnnnnnnnnnnnnnnnnnnnnnnnnnnnnnnnnnnnnnnnnnnnnnnnnnnnnnnnnnnnnnnnnnnnnnnnnnnnnnnnnnnnnnnnnnnnnnnnnnnnnnnnnnnnnnnnnnnnnnnnnnnnnnnnnnnnnnnnnnnnnnnnnnnnnnnnnnnnnnnnnnnnnnnnnnnnnnnnnnnnnnnnnnnnnnnnnnnnnnnnnnnnnnnnnnnnnnnnnnnnnnnnnnnnnnnnnnnnnnnnnnnnnnnnnnnnnnnnnnnnnnnnnnnnnnnnnnnnnnnnnnnnnnnnnnnnnnnnnnnnnnnnnnnnnnnnnnnnnnnnnnnnnnnnnnnnnnnnnnnnnnnnnnnnnnnnnnnnnnnnnnnnnnnnnnnnnnnnnnnnnnnnnnnnnnnnnnnnnnnnnnnnnnnnnnnnnnnnnnnnnnnnnnnnnnnnnnnnnnnnnnnnnnnnnnnnnnnnnnnnnnnnnnnnnnnnnnnnnnnnnnnnnnnnnnnnnnnnnnnnnnnnnnnnnnnnnnnnnnnnnnnnnnnnnnnnnnnnnnnnnnnnnnnnnnnnnnnnnnnnnnnnnnnnnnnnnnnnnnnnnnnnnnnnnnnnnnnnnnnnnnnnnnnnnnnnnnnnnnnnnnnnnnnnnnnnnnnnnnnnnnnnnnnnnnnnnnnnnnnnnnnnnnnnnnnnnnnnnnnnnnnnnnnnnnnnnnnnnnnnnnnnnnnnnnnnnnnnnnnnnnnnnnnnnnnnnnnnnnnnnnnnnnnnnnnnnnnnnnnnnnnnnnnnnnnnnnnnnnnnnnnnnnnnnnnnnnnnnnnnnnnnnnnnnnnnnnnnnnnnnnnnnnnnnnnnnnnnnnnnnnnnnnnnnnnnnnnnnnnnnnnnnnnnnnnnnnnnnnnnnnnnnnnnnnnnnnnnnnnnnnnnnnnnnnnnnnnnnnnnnnnnnnnnnnnnnnnnnnnnnnnnnnnnnnnnnnnnnnnnnnnnnnnnnnnnnnnnnnnnnnnnnnnnnnnnnnnnnnnnnnnnnnnnnnnnnnnnnnnnnnnnnnnnnnnnnnnnnnnnnnnnnnnnnnnnnnnnnnnnnnnnnnnnnnnnnnnnnnnnnnnnnnnnnnnnnnnnnnnnnnnnnnnnnnnnnnnnnnnnnnnnnnnnnnnnnnnnnnnnnnnnnnnnnnnnnnnnnnnnnnnnnnnnnnnnnnnnnnnnnnnnnnnnnnnnnnnnnnnnnnnnnnnnnnnnnnnnnnnnnnnnnnnnnnnnnnnnnnnnnnnnnnnnnnnnnnnnnnnnnnnnnnnnnnnnnnnnnnnnnnnnnnnnnnnnnnnnnnnnnnnnnnnnnnnnnnnnnnnnnnnnnnnnnnnnnnnnnnnnnnnnnnnnnnnnnnnnnnnnnnnnnnnnnnnnnnnnnnnnnnnnnnnnnnnnnnnnnnnnnnnnnnnnnnnnnnnnnnnnnnnnnnnnnnnnnnnnnnnnnnnnnnnnnnnnnnnnnnnnnnnnnnnnnnnnnnnnnnnnnnnnnnnnnnnnnnnnnnnnnnnnnnnnnnnnnnnnnnnnnnnnnnnnnnnnnnnnnnnnnnnnnnnnnnnnnnnnnnnnnnnnnnnnnnnnnnnnnnnnnnnnnnnnnnnnnnnnnnnnnnnnnnnnnnnnnnnnnnnnnnnnnnnnnnnnnnnnnnnnnnnnnnnnnnnnnnnnnnnnnnnnnnnnnnnnnnnnnnnnnnnnnnnnnnnnnnnnnnnnnnnnnnnnnnnnnnnnnnnnnnnnnnnnnnnnnnnnnnnnnnnnnnnnnnnnnnnnnnnnnnnnnnnnnnnnnnnnnnnnnnnnnnnnnnnnnnnnnnnnnnnnnnnnnnnnnnnnnnnnnnnnnnnnnnnnnnnnnnnnnnnnnnnnnnnnnnnnnnnnnnnnnnnnnnnnnnnnnnnnnnnnnnnnnnnnnnnnnnnnnnnnnnnnnnnnnnnnnnnnnnnnnnnnnnnnnnnnnnnnnnnnnnnnnnnnnnnnnnnnnnnnnnnnnnnnnnnnnnnnnnnnnnnnnnnnnnnnnnnnnnnnnnnnnnnnnnnnnnnnnnnnnnnnnnnnnnnnnnnnnnnnnnnnnnnnnnnnnnnnnnnnnnnnnnnnnnnnnnnnnnnnnnnnnnnnnnnnnnnnnnnnnnnnnnnnnnnnnnnnnnnnnnnnnnnnnnnnnnnnnnnnnnnnnnnnnnnnnnnnnnnnnnnnnnnnnnnnnnnnnnnnnnnnnnnnnnnnnnnnnnnnnnnnnnnnnnnnnnnnnnnnnnnnnnnnnnnnnnnnnnnnnnnnnnnnnnnnnnnnnnnnnnnnnnnnnnnnnnnnnnnnnnnnnnnnnnnnnnnnnnnnnnnnnnnnnnnnnnnnnnnnnnnnnnnnnnnnnnnnnnnnnnnnnnnnnnnnnnnnnnnnnnnnnnnnnnnnnnnnnnnnnnnnnnnnnnnnnnnnnnnnnnnnnnnnnnnnnnnnnnnnnnnnnnnnnnnnnnnnnnnnnnnnnnnnnnnnnnnnnnnnnnnnnnnnnnnnnnnnnnnnnnnnnnnnnnnnnnnnnnnnnnnnnnnnnnnnnnnnnnnnnnnnnnnnnnnnnnnnnnnnnnnnnnnnnnnnnnnnnnnnnnnnnnnnnnnnnnnnnnnnnnnnnnnnnnnnnnnnnnnnnnnnnnnnnnnnnnnnnnnnnnnnnnnnnnnnnnnnnnnnnnnnnnnnnnnnnnnnnnnnnnnnnnnnnnnnnnnnnnnnnnnnnnnnnnnnnnnnnnnnnnnnnnnnnnnnnnnnnnnnnnnnnnnnnnnnnnnnnnnnnnnnnnnnnnnnnnnnnnnnnnnnnnnnnnnnnnnnnnnnnnnnnnnnnnnnnnnnnnnnnnnnnnnnnnnnnnnnnnnnnnnnnnnnnnnnnnnnnnnnnnnnnnnnnnnnnnnnnnnnnnnnnnnnnnnnnnnnnnnnnnnnnnnnnnnnnnnnnnnnnnnnnnnnnnnnnnnnnnnnnnnnnnnnnnnnnnnnnnnnnnnnnnnnnnnnnnnnnnnnnnnnnnnnnnnnnnnnnnnnnnnnnnnnnnnnnnnnnnnnnnnnnnnnnnnnnnnnnnnnnnnnnnnnnnnnnnnnnnnnnnnnnnnnnnnnnnnnnnnnnnnnnnnnnnnnnnnnnnnnnnnnnnnnnnnnnnnnnnnnnnnnnnnnnnnnnnnnnnnnnnnnnnnnnnnnnnnnnnnnnnnnnnnnnnnnnnnnnnnnnnnnnnnnnnnnnnnnnnnnnnnnnnnnnnnnnnnnnnnnnnnnnnnnnnnnnnnnnnnnnnnnnnnnnnnnnnnnnnnnnnnnnnnnnnnnnnnnnnnnnnnnnnnnnnnnnnnnnnnnnnnnnnnnnnnnnnnnnnnnnnnnnnnnnnnnnnnnnnnnnnnnnnnnnnnnnnnnnnnnnnnnnnnnnnnnnnnnnnnnnnnnnnnnnnnnnnnnnnnnnnnnnnnnnnnnnnnnnnnnnnnnnnnnnnnnnnnnnnnnnnnnnnnnnnnnnnnnnnnnnnnnnnnnnnnnnnnnnnnnnnnnnnnnnnnnnnnnnnnnnnnnnnnnnnnnnnnnnnnnnnnnnnnnnnnnnnnnnnnnnnnnnnnnnnnnnnnnnnnnnnnnnnnnnnnnnnnnnnnnnnnnnnnnnnnnnnnnnnnnnnnnnnnnnnnnnnnnnnnnnnnnnnnnnnnnnnnnnnnnnnnnnnnnnnnnnnnnnnnnnnnnnnnnnnnnnnnnnnnnnnnnnnnnnnnnnnnnnnnnnnnnnnnnnnnnnnnnnnnnnnnnnnnnnnnnnnnnnnnnnnnnnnnnnnnnnnnnnnnnnnnnnnnnnnnnnnnnnnnnnnnnnnnnnnnnnnnnnnnnnnnnnnnnnnnnnnnnnnnnnnnnnnnnnnnnnnnnnnnnnnnnnnnnnnnnnnnnnnnnnnnnnnnnnnnnnnnnnnnnnnnnnnnnnnnnnnnnnnnnnnnnnnnnnnnnnnnnnnnnnnnnnnnnnnnnnnnnnnnnnnnnnnnnnnnnnnnnnnnnnnnnnnnnnnnnnnnnnnnnnnnnnnnnnnnnnnnnnnnnnnnnnnnnnnnnnnnnnnnnnnnnnnnnnnnnnnnnnnnnnnnnnnnnnnnnnnnnnnnnnnnnnnnnnnnnnnnnnnnnnnnnnnnnnnnnnnnnnnnnnnnnnnnnnnnnnnnnnnnnnnnnnnnnnnnnnnnnnnnnnnnnnnnnnnnnnnnnnnnnnnnnnnnnnnnnnnnnnnnnnnnnnnnnnnnnnnnnnnnnnnnnnnnnnnnnnnnnnnnnnnnnnnnnnnnnnnnnnnnnnnnnnnnnnnnnnnnnnnnnnnnnnnnnnnnnnnnnnnnnnnnnnnnnnnnnnnnnnnnnnnnnnnnnnnnnnnnnnnnnnnnnnnnnnnnnnnnnnnnnnnnnnnnnnnnnnnnnnnnnnnnnnnnnnnnnnnnnnnnnnnnnnnnnnnnnnnnnnnnnnnnnnnnnnnnnnnnnnnnnnnnnnnnnnnnnnnnnnnnnnnnnnnnnnnnnnnnnnnnnnnnnnnnnnnnnnnnnnnnnnnnnnnnnnnnnnnnnnnnnnnnnnnnnnnnnnnnnnnnnnnnnnnnnnnnnnnnnnnnnnnnnnnnnnnnnnnnnnnnnnnnnnnnnnnnnnnnnnnnnnnnnnnnnnnnnnnnnnnnnnnnnnnnnnnnnnnnnnnnnnnnnnnnnnnnnnnnnnnnnnnnnnnnnnnnnnnnnnnnnnnnnnnnnnnnnnnnnnnnnnnnnnnnnnnnnnnnnnnnnnnnnnnnnnnnnnnnnnnnnnnnnnnnnnnnnnnnnnnnnnnnnnnnnnnnnnnnnnnnnnnnnnnnnnnnnnnnnnnnnnnnnnnnnnnnnnnnnnnnnnnnnnnnnnnnnnnnnnnnnnnnnnnnnnnnnnnnnnnnnnnnnnnnnnnnnnnnnnnnnnnnnnnnnnnnnnnnnnnnnnnnnnnnnnnnnnnnnnnnnnnnnnnnnnnnnnnnnnnnnnnnnnnnnnnnnnnnnnnnnnnnnnnnnnnnnnnnnnnnnnnnnnnnnnnnnnnnnnnnnnnnnnnnnnnnnnnnnnnnnnnnnnnnnnnnnnnnnnnnnnnnnnnnnnnnnnnnnnnnnnnnnnnnnnnnnnnnnnnnnnnnnnnnnnnnnnnnnnnnnnnnnnnnnnnnnnnnnnnnnnnnnnnnnnnnnnnnnnnnnnnnnnnnnnnnnnnnnnnnnnnnnnnnnnnnnnnnnnnnnnnnnnnnnnnnnnnnnnnnnnnnnnnnnnnnnnnnnnnnnnnnnnnnnnnnnnnnnnnnnnnnnnnnnnnnnnnnnnnnnnnnnnnnnnnnnnnnnnnnnnnnnnnnnnnnnnnnnnnnnnnnnnnnnnnnnnnnnnnnnnnnnnnnnnnnnnnnnnnnnnnnnnnnnnnnnnnnnnnnnnnnnnnnnnnnnnnnnnnnnnnnnnnnnnnnnnnnnnnnnnnnnnnnnnnnnnnnnnnnnnnnnnnnnnnnnnnnnnnnnnnnnnnnnnnnnnnnnnnnnnnnnnnnnnnnnnnnnnnnnnnnnnnnnnnnnnnnnnnnnnnnnnnnnnnnnnnnnnnnnnnnnnnnnnnnnnnnnnnnnnnnnnnnnnnnnnnnnnnnnnnnnnnnnnnnnnnnnnnnnnnnnnnnnnnnnnnnnnnnnnnnnnnnnnnnnnnnnnnnnnnnnnnnnnnnnnnnnnnnnnnnnnnnnnnnnnnnnnnnnnnnnnnnnnnnnnnnnnnnnnnnnnnnnnnnnnnnnnnnnnnnnnnnnnnnnnnnnnnnnnnnnnnnnnnnnnnnnnnnnnnnnnnnnnnnnnnnnnnnnnnnnnnnnnnnnnnnnnnnnnnnnnnnnnnnnnnnnnnnnnnnnnnnnnnnnnnnnnnnnnnnnnnnnnnnnnnnnnnnnnnnnnnnnnnnnnnnnnnnnnnnnnnnnnnnnnnnnnnnnnnnnnnnnnnnnnnnnnnnnnnnnnnnnnnnnnnnnnnnnnnnnnnnnnnnnnnnnnnnnnnnnnnnnnnnnnnnnnnnnnnnnnnnnnnnnnnnnnnnnnnnnnnnnnnnnnnnnnnnnnnnnnnnnnnnnnnnnnnnnnnnnnnnnnnnnnnnnnnnnnnnnnnnnnnnnnnnnnnnnnnnnnnnnnnnnnnnnnnnnnnnnnnnnnnnnnnnnnnnnnnnnnnnnnnnnnnnnnnnnnnnnnnnnnnnnnnnnnnnnnnnnnnnnnnnnnnnnnnnnnnnnnnnnnnnnnnnnnnnnnnnnnnnnnnnnnnnnnnnnnnnnnnnnnnnnnnnnnnnnnnnnnnnnnnnnnnnnnnnnnnnnnnnnnnnnnnnnnnnnnnnnnnnnnnnnnnnnnnnnnnnnnnnnnnnnnnnnnnnnnnnnnnnnnnnnnnnnnnnnnnnnnnnnnnnnnnnnnnnnnnnnnnnnnnnnnnnnnnnnnnnnnnnnnnnnnnnnnnnnnnnnnnnnnnnnnnnnnnnnnnnnnnnnnnnnnnnnnnnnnnnnnnnnnnnnnnnnnnnnnnnnnnnnnnnnnnnnnnnnnnnnnnnnnnnnnnnnnnnnnnnnnnnnnnnnnnnnnnnnnnnnnnnnnnnnnnnnnnnnnnnnnnnnnnnnnnnnnnnnnnnnnnnnnnnnnnnnnnnnnnnnnnnnnnnnnnnnnnnnnnnnnnnnnnnnnnnnnnnnnnnnnnnnnnnnnnnnnnnnnnnnnnnnnnnnnnnnnnnnnnnnnnnnnnnnnnnnnnnnnnnnnnnnnnnnnnnnnnnnnnnnnnnnnnnnnnnnnnnnnnnnnnnnnnnnnnnnnnnnnnnnnnnnnnnnnnnnnnnnnnnnnnnnnnnnnnnnnnnnnnnnnnnnnnnnnnnnnnnnnnnnnnnnnnnnnnnnnnnnnnnnnnnnnnnnnnnnnnnnnnnnnnnnnnnnnnnnnnnnnnnnnnnnnnnnnnnnnnnnnnnnnnnnnnnnnnnnnnnnnnnnnnnnnnnnnnnnnnnnnnnnnnnnnnnnnnnnnnnnnnnnnnnnnnnnnnnnnnnnnnnnnnnnnnnnnnnnnnnnnnnnnnnnnnnnnnnnnnnnnnnnnnnnnnnnnnnnnnnnnnnnnnnnnnnnnnnnnnnnnnnnnnnnnnnnnnnnnnnnnnnnnnnnnnnnnnnnnnnnnnnnnnnnnnnnnnnnnnnnnnnnnnnnnnnnnnnnnnnnnnnnnnnnnnnnnnnnnnnnnnnnnnnnnnnnnnnnnnnnnnnnnnnnnnnnnnnnnnnnnnnnnnnnnnnnnnnnnnnnnnnnnnnnnnnnnnnnnnnnnnnnnnnnnnnnnnnnnnnnnnnnnnnnnnnnnnnnnnnnnnnnnnnnnnnnnnnnnnnnnnnnnnnnnnnnnnnnnnnnnnnnnnnnnnnnnnnnnnnnnnnnnnnnnnnnnnnnnnnnnnnnnnnnnnnnnnnnnnnnnnnnnnnnnnnnnnnnnnnnnnnnnnnnnnnnnnnnnnnnnnnnnnnnnnnnnnnnnnnnnnnnnnnnnnnnnnnnnnnnnnnnnnnnnnnnnnnnnnnnnnnnnnnnnnnnnnnnnnnnnnnnnnnnnnnnnnnnnnnnnnnnnnnnnnnnnnnnnnnnnnnnnnnnnnnnnnnnnnnnnnnnnnnnnnnnnnnnnnnnnnnnnnnnnnnnnnnnnnnnnnnnnnnnnnnnnnnnnnnnnnnnnnnnnnnnnnnnnnnnnnnnnnnnnnnnnnnnnnnnnnnnnnnnnnnnnnnnnnnnnnnnnnnnnnnnnnnnnnnnnnnnnnnnnnnnnnnnnnnnnnnnnnnnnnnnnnnnnnnnnnnnnnnnnnnnnnnnnnnnnnnnnnnnnnnnnnnnnnnnnnnnnnnnnnnnnnnnnnnnnnnnnnnnnnnnnnnnnnnnnnnnnnnnnnnnnnnnnnnnnnnnnnnnnnnnnnnnnnnnnnnnnnnnnnnnnnnnnnnnnnnnnnnnnnnnnnnnnnnnnnnnnnnnnnnnnnnnnnnnnnnnnnnnnnnnnnnnnnnnnnnnnnnnnnnnnnnnnnnnnnnnnnnnnnnnnnnnnnnnnnnnnnnnnnnnnnnnnnnnnnnnnnnnnnnnnnnnnnnnnnnnnnnnnnnnnnnnnnnnnnnnnnnnnnnnnnnnnnnnnnnnnnnnnnnnnnnnnnnnnnnnnnnnnnnnnnnnnnnnnnnnnnnnnnnnnnnnnnnnnnnnnnnnnnnnnnnnnnnnnnnnnnnnnnnnnnnnnnnnnnnnnnnnnnnnnnnnnnnnnnnnnnnnnnnnnnnnnnnnnnnnnnnnnnnnnnnnnnnnnnnnnnnnnnnnnnnnnnnnnnnnnnnnnnnnnnnnnnnnnnnnnnnnnnnnnnnnnnnnnnnnnnnnnnnnnnnnnnnnnnnnnnnnnnnnnnnnnnnnnnnnnnnnnnnnnnnnnnnnnnnnnnnnnnnnnnnnnnnnnnnnnnnnnnnnnnnnnnnnnnnnnnnnnnnnnnnnnnnnnnnnnnnnnnnnnnnnnnnnnnnnnnnnnnnnnnnnnnnnnnnnnnnnnnnnnnnnnnnnnnnnnnnnnnnnnnnnnnnnnnnnnnnnnnnnnnnnnnnnnnnnnnnnnnnnnnnnnnnnnnnnnnnnnnnnnnnnnnnnnnnnnnnnnnnnnnnnnnnnnnnnnnnnnnnnnnnnnnnnnnnnnnnnnnnnnnnnnnnnnnnnnnnnnnnnnnnnnnnnnnnnnnnnnnnnnnnnnnnnnnnnnnnnnnnnnnnnnnnnnnnnnnnnnnnnnnnnnnnnnnnnnnnnnnnnnnnnnnnnnnnnnnnnnnnnnnnnnnnnnnnnnnnnnnnnnnnnnnnnnnnnnnnnnnnnnnnnnnnnnnnnnnnnnnnnnnnnnnnnnnnnnnnnnnnnnnnnnnnnnnnnnnnnnnnnnnnnnnnnnnnnnnnnnnnnnnnnnnnnnnnnnnnnnnnnnnnnnnnnnnnnnnnnnnnnnnnnnnnnnnnnnnnnnnnnnnnnnnnnnnnnnnnnnnnnnnnnnnnnnnnnnnnnnnnnnnnnnnnnnnnnnnnnnnnnnnnnnnnnnnnnnnnnnnnnnnnnnnnnnnnnnnnnnnnnnnnnnnnnnnnnnnnnnnnnnnnnnnnnnnnnnnnnnnnnnnnnnnnnnnnnnnnnnnnnnnnnnnnnnnnnnnnnnnnnnnnnnnnnnnnnnnnnnnnnnnnnnnnnnnnnnnnnnnnnnnnnnnnnnnnnnnnnnnnnnnnnnnnnnnnnnnnnnnnnnnnnnnnnnnnnnnnnnnnnnnnnnnnnnnnnnnnnnnnnnnnnnnnnnnnnnnnnnnnnnnnnnnnnnnnnnnnnnnnnnnnnnnnnnnnnnnnnnnnnnnnnnnnnnnnnnnnnnnnnnnnnnnnnnnnnnnnnnnnnnnnnnnnnnnnnnnnnnnnnnnnnnnnnnnnnnnnnnnnnnnnnnnnnnnnnnnnnnnnnnnnnnnnnnnnnnnnnnnnnnnnnnnnnnnnnnnnnnnnnnnnnnnnnnnnnnnnnnnnnnnnnnnnnnnnnnnnnnnnnnnnnnnnnnnnnnnnnnnnnnnnnnnnnnnnnnnnnnnnnnnnnnnnnnnnnnnnnnnnnnnnnnnnnnnnnnnnnnnnnnnnnnnnnnnnnnnnnnnnnnnnnnnnnnnnnnnnnnnnnnnnnnnnnnnnnnnnnnnnnnnnnnnnnnnnnnnnnnnnnnnnnnnnnnnnnnnnnnnnnnnnnnnnnnnnnnnnnnnnnnnnnnnnnnnnnnnnnnnnnnnnnnnnnnnnnnnnnnnnnnnnnnnnnnnnnnnnnnnnnnnnnnnnnnnnnnnnnnnnnnnnnnnnnnnnnnnnnnnnnnnnnnnnnnnnnnnnnnnnnnnnnnnnnnnnnnnnnnnnnnnnnnnnnnnnnnnnnnnnnnnnnnnnnnnnnnnnnnnnnnnnnnnnnnnnnnnnnnnnnnnnnnnnnnnnnnnnnnnnnnnnnnnnnnnnnnnnnnnnnnnnnnnnnnnnnnnnnnnnnnnnnnnnnnnnnnnnnnnnnnnnnnnnnnnnnnnnnnnnnnnnnnnnnnnnnnnnnnnnnnnnnnnnnnnnnnnnnnnnnnnnnnnnnnnnnnnnnnnnnnnnnnnnnnnnnnnnnnnnnnnnnnnnnnnnnnnnnnnnnnnnnnnnnnnnnnnnnnnnnnnnnnnnnnnnnnnnnnnnnnnnnnnnnnnnnnnnnnnnnnnnnnnnnnnnnnnnnnnnnnnnnnnnnnnnnnnnnnnnnnnnnnnnnnnnnnnnnnnnnnnnnnnnnnnnnnnnnnnnnnnnnnnnnnnnnnnnnnnnnnnnnnnnnnnnnnnnnnnnnnnnnnnnnnnnnnnnnnnnnnnnnnnnnnnnnnnnnnnnnnnnnnnnnnnnnnnnnnnnnnnnnnnnnnnnnnnnnnnnnnnnnnnnnnnnnnnnnnnnnnnnnnnnnnnnnnnnnnnnnnnnnnnnnnnnnnnnnnnnnnnnnnnnnnnnnnnnnnnnnnnnnnnnnnnnnnnnnnnnnnnnnnnnnnnnnnnnnnnnnnnnnnnnnnnnnnnnnnnnnnnnnnnnnnnnnnnnnnnnnnnnnnnnnnnnnnnnnnnnnnnnnnnnnnnnnnnnnnnnnnnnnnnnnnnnnnnnnnnnnnnnnnnnnnnnnnnnnnnnnnnnnnnnnnnnnnnnnnnnnnnnnnnnnnnnnnnnnnnnnnnnnnnnnnnnnnnnnnnnnnnnnnnnnnnnnnnnnnnnnnnnnnnnnnnnnnnnnnnnnnnnnnnnnnnnnnnnnnnnnnnnnnnnnnnnnnnnnnnnnnnnnnnnnnnnnnnnnnnnnnnnnnnnnnnnnnnnnnnnnnnnnnnnnnnnnnnnnnnnnnnnnnnnnnnnnnnnnnnnnnnnnnnnnnnnnnnnnnnnnnnnnnnnnnnnnnnnnnnnnnnnnnnnnnnnnnnnnnnnnnnnnnnnnnnnnnnnnnnnnnnnnnnnnnnnnnnnnnnnnnnnnnnnnnnnnnnnnnnnnnnnnnnnnnnnnnnnnnnnnnnnnnnnnnnnnnnnnnnnnnnnnnnnnnnnnnnnnnnnnnnnnnnnnnnnnnnnnnnnnnnnnnnnnnnnnnnnnnnnnnnnnnnnnnnnnnnnnnnnnnnnnnnnnnnnnnnnnnnnnnnnnnnnnnnnnnnnnnnnnnnnnnnnnnnnnnnnnnnnnnnnnnnnnnnnnnnnnnnnnnnnnnnnnnnnnnnnnnnnnnnnnnnnnnnnnnnnnnnnnnnnnnnnnnnnnnnnnnnnnnnnnnnnnnnnnnnnnnnnnnnnnnnnnnnnnnnnnnnnnnnnnnnnnnnnnnnnnnnnnnnnnnnnnnnnnnnnnnnnnnnnnnnnnnnnnnnnnnnnnnnnnnnnnnnnnnnnnnnnnnnnnnnnnnnnnnnnnnnnnnnnnnnnnnnnnnnnnnnnnnnnnnnnnnnnnnnnnnnnnnnnnnnnnnnnnnnnnnnnnnnnnnnnnnnnnnnnnnnnnnnnnnnnnnnnnnnnnnnnnnnnnnnnnnnnnnnnnnnnnnnnnnnnnnnnnnnnnnnnnnnnnnnnnnnnnnnnnnnnnnnnnnnnnnnnnnnnnnnnnnnnnnnnnnnnnnnnnnnnnnnnnnnnnnnnnnnnnnnnnnnnnnnnnnnnnnnnnnnnnnnnnnnnnnnnnnnnnnnnnnnnnnnnnnnnnnnnnnnnnnnnnnnnnnnnnnnnnnnnnnnnnnnnnnnnnnnnnnnnnnnnnnnnnnnnnnnnnnnnnnnnnnnnnnnnnnnnnnnnnnnnnnnnnnnnnnnnnnnnnnnnnnnnnnnnnnnnnnnnnnnnnnnnnnnnnnnnnnnnnnnnnnnnnnnnnnnnnnnnnnnnnnnnnnnnnnnnnnnnnnnnnnnnnnnnnnnnnnnnnnnnnnnnnnnnnnnnnnnnnnnnnnnnnnnnnnnnnnnnnnnnnnnnnnnnnnnnnnnnnnnnnnnnnnnnnnnnnnnnnnnnnnnnnnnnnnnnnnnnnnnnnnnnnnnnnnnnnnnnnnnnnnnnnnnnnnnnnnnnnnnnnnnnnnnnnnnnnnnnnnnnnnnnnnnnnnnnnnnnnnnnnnnnnnnnnnnnnnnnnnnnnnnnnnnnnnnnnnnnnnnnnnnnnnnnnnnnnnnnnnnnnnnnnnnnnnnnnnnnnnnnnnnnnnnnnnnnnnnnnnnnnnnnnnnnnnnnnnnnnnnnnnnnnnnnnnnnnnnnnnnnnnnnnnnnnnnnnnnnnnnnnnnnnnnnnnnnnnnnnnnnnnnnnnnnnnnnnnnnnnnnnnnnnnnnnnnnnnnnnnnnnnnnnnnnnnnnnnnnnnnnnnnnnnnnnnnnnnnnnnnnnnnnnnnnnnnnnnnnnnnnnnnnnnnnnnnnnnnnnnnnnnnnnnnnnnnnnnnnnnnnnnnnnnnnnnnnnnnnnnnnnnnnnnnnnnnnnnnnnnnnnnnnnnnnnnnnnnnnnnnnnnnnnnnnnnnnnnnnnnnnnnnnnnnnnnnnnnnnnnnnnnnnnnnnnnnnnnnnnnnnnnnnnnnnnnnnnnnnnnnnnnnnnnnnnnnnnnnnnnnnnnnnnnnnnnnnnnnnnnnnnnnnnnnnnnnnnnnnnnnnnnnnnnnnnnnnnnnnnnnnnnnnnnnnnnnnnnnnnnnnnnnnnnnnnnnnnnnnnnnnnnnnnnnnnnnnnnnnnnnnnnnnnnnnnnnnnnnnnnnnnnnnnnnnnnnnnnnnnnnnnnnnnnnnnnnnnnnnnnnnnnnnnnnnnnnnnnnnnnnnnnnnnnnnnnnnnnnnnnnnnnnnnnnnnnnnnnnnnnnnnnnnnnnnnnnnnnnnnnnnnnnnnnnnnnnnnnnnnnnnnnnnnnnnnnnnnnnnnnnnnnnnnnnnnnnnnnnnnnnnnnnnnnnnnnnnnnnnnnnnnnnnnnnnnnnnnnnnnnnnnnnnnnnnnnnnnnnnnnnnnnnnnnnnnnnnnnnnnnnnnnnnnnnnnnnnnnnnnnnnnnnnnnnnnnnnnnnnnnnnnnnnnnnnnnnnnnnnnnnnnnnnnnnnnnnnnnnnnnnnnnnnnnnnnnnnnnnnnnnnnnnnnnnnnnnnnnnnnnnnnnnnnnnnnnnnnnnnnnnnnnnnnnnnnnnnnnnnnnnnnnnnnnnnnnnnnnnnnnnnnnnnnnnnnnnnnnnnnnnnnnnnnnnnnnnnnnnnnnnnnnnnnnnnnnnnnnnnnnnnnnnnnnnnnnnnnnnnnnnnnnnnnnnnnnnnnnnnnnnnnnnnnnnnnnnnnnnnnnnnnnnnnnnnnnnnnnnnnnnnnnnnnnnnnnnnnnnnnnnnnnnnnnnnnnnnnnnnnnnnnnnnnnnnnnnnnnnnnnnnnnnnnnnnnnnnnnnnnnnnnnnnnnnnnnnnnnnnnnnnnnnnnnnnnnnnnnnnnnnnnnnnnnnnnnnnnnnnnnnnnnnnnnnnnnnnnnnnnnnnnnnnnnnnnnnnnnnnnnnnnnnnnnnnnnnnnnnnnnnnnnnnnnnnnnnnnnnnnnnnnnnnnnnnnnnnnnnnnnnnnnnnnnnnnnnnnnnnnnnnnnnnnnnnnnnnnnnnnnnnnnnnnnnnnnnnnnnnnnnnnnnnnnnnnnnnnnnnnnnnnnnnnnnnnnnnnnnnnnnnnnnnnnnnnnnnnnnnnnnnnnnnnnnnnnnnnnnnnnnnnnnnnnnnnnnnnnnnnnnnnnnnnnnnnnnnnnnnnnnnnnnnnnnnnnnnnnnnnnnnnnnnnnnnnnnnnnnnnnnnnnnnnnnnnnnnnnnnnnnnnnnnnnnnnnnnnnnnnnnnnnnnnnnnnnnnnnnnnnnnnnnnnnnnnnnnnnnnnnnnnnnnnnnnnnnnnnnnnnnnnnnnnnnnnnnnnnnnnnnnnnnnnnnnnnnnnnnnnnnnnnnnnnnnnnnnnnnnnnnnnnnnnnnnnnnnnnnnnnnnnnnnnnnnnnnnnnnnnnnnnnnnnnnnnnnnnnnnnnnnnnnnnnnnnnnnnnnnnnnnnnnnnnnnnnnnnnnnnnnnnnnnnnnnnnnnnnnnnnnnnnnnnnnnnnnnnnnnnnnnnnnnnnnnnnnnnnnnnnnnnnnnnnnnnnnnnnnnnnnnnnnnnnnnnnnnnnnnnnnnnnnnnnnnnnnnnnnnnnnnnnnnnnnnnnnnnnnnnnnnnnnnnnnnnnnnnnnnnnnnnnnnnnnnnnnnnnnnnnnnnnnnnnnnnnnnnnnnnnnnnnnnnnnnnnnnnnnnnnnnnnnnnnnnnnnnnnnnnnnnnnnnnnnnnnnnnnnnnnnnnnnnnnnnnnnnnnnnnnnnnnnnnnnnnnnnnnnnnnnnnnnnnnnnnnnnnnnnnnnnnnnnnnnnnnnnnnnnnnnnnnnnnnnnnnnnnnnnnnnnnnnnnnnnnnnnnnnnnnnnnnnnnnnnnnnnnnnnnnnnnnnnnnnnnnnnnnnnnnnnnnnnnnnnnnnnnnnnnnnnnnnnnnnnnnnnnnnnnnnnnnnnnnnnnnnnnnnnnnnnnnnnnnnnnnnnnnnnnnnnnnnnnnnnnnnnnnnnnnnnnnnnnnnnnnnnnnnnnnnnnnnnnnnnnnnnnnnnnnnnnnnnnnnnnnnnnnnnnnnnnnnnnnnnnnnnnnnnnnnnnnnnnnnnnnnnnnnnnnnnnnnnnnnnnnnnnnnnnnnnnnnnnnnnnnnnnnnnnnnnnnnnnnnnnnnnnnnnnnnnnnnnnnnnnnnnnnnnnnnnnnnnnnnnnnnnnnnnnnnnnnnnnnnnnnnnnnnnnnnnnnnnnnnnnnnnnnnnnnnnnnnnnnnnnnnnnnnnnnnnnnnnnnnnnnnnnnnnnnnnnnnnnnnnnnnnnnnnnnnnnnnnnnnnnnnnnnnnnnnnnnnnnnnnnnnnnnnnnnnnnnnnnnnnnnnnnnnnnnnnnnnnnnnnnnnnnnnnnnnnnnnnnnnnnnnnnnnnnnnnnnnnnnnnnnnnnnnnnnnnnnnnnnnnnnnnnnnnnnnnnnnnnnnnnnnnnnnnnnnnnnnnnnnnnnnnnnnnnnnnnnnnnnnnnnnnnnnnnnnnnnnnnnnnnnnnnnnnnnnnnnnnnnnnnnnnnnnnnnnnnnnnnnnnnnnnnnnnnnnnnnnnnnnnnnnnnnnnnnnnnnnnnnnnnnnnnnnnnnnnnnnnnnnnnnnnnnnnnnnnnnnnnnnnnnnnnnnnnnnnnnnnnnnnnnnnnnnnnnnnnnnnnnnnnnnnnnnnnnnnnnnnnnnnnnnnnnnnnnnnnnnnnnnnnnnnnnnnnnnnnnnnnnnnnnnnnnnnnnnnnnnnnnnnnnnnnnnnnnnnnnnnnnnnnnnnnnnnnnnnnnnnnnnnnnnnnnnnnnnnnnnnnnnnnnnnnnnnnnnnnnnnnnnnnnnnnnnnnnnnnnnnnnnnnnnnnnnnnnnnnnnnnnnnnnnnnnnnnnnnnnnnnnnnnnnnnnnnnnnnnnnnnnnnnnnnnnnnnnnnnnnnnnnnnnnnnnnnnnnnnnnnnnnnnnnnnnnnnnnnnnnnnnnnnnnnnnnnnnnnnnnnnnnnnnnnnnnnnnnnnnnnnnnnnnnnnnnnnnnnnnnnnnnnnnnnnnnnnnnnnnnnnnnnnnnnnnnnnnnnnnnnnnnnnnnnnnnnnnnnnnnnnnnnnnnnnnnnnnnnnnnnnnnnnnnnnnnnnnnnnnnnnnnnnnnnnnnnnnnnnnnnnnnnnnnnnnnnnnnnnnnnnnnnnnnnnnnnnnnnnnnnnnnnnnnnnnnnnnnnnnnnnnnnnnnnnnnnnnnnnnnnnnnnnnnnnnnnnnnnnnnnnnnnnnnnnnnnnnnnnnnnnnnnnnnnnnnnnnnnnnnnnnnnnnnnnnnnnnnnnnnnnnnnnnnnnnnnnnnnnnnnnnnnnnnnnnnnnnnnnnnnnnnnnnnnnnnnnnnnnnnnnnnnnnnnnnnnnnnnnnnnnnnnnnnnnnnnnnnnnnnnnnnnnnnnnnnnnnnnnnnnnnnnnnnnnnnnnnnnnnnnnnnnnnnnnnnnnnnnnnnnnnnnnnnnnnnnnnnnnnnnnnnnnnnnnnnnnnnnnnnnnnnnnnnnnnnnnnnnnnnnnnnnnnnnnnnnnnnnnnnnnnnnnnnnnnnnnnnnnnnnnnnnnnnnnnnnnnnnnnnnnnnnnnnnnnnnnnnnnnnnnnnnnnnnnnnnnnnnnnnnnnnnnnnnnnnnnnnnnnnnnnnnnnnnnnnnnnnnnnnnnnnnnnnnnnnnnnnnnnnnnnnnnnnnnnnnnnnnnnnnnnnnnnnnnnnnnnnnnnnnnnnnnnnnnnnnnnnnnnnnnnnnnnnnnnnnnnnnnnnnnnnnnnnnnnnnnnnnnnnnnnnnnnnnnnnnnnnnnnnnnnnnnnnnnnnnnnnnnnnnnnnnnnnnnnnnnnnnnnnnnnnnnnnnnnnnnnnnnnnnnnnnnnnnnnnnnnnnnnnnnnnnnnnnnnnnnnnnnnnnnnnnnnnnnnnnnnnnnnnnnnnnnnnnnnnnnnnnnnnnnnnnnnnnnnnnnnnnnnnnnnnnnnnnnnnnnnnnnnnnnnnnnnnnnnnnnnnnnnnnnnnnnnnnnnnnnnnnnnnnnnnnnnnnnnnnnnnnnnnnnnnnnnnnnnnnnnnnnnnnnnnnnnnnnnnnnnnnnnnnnnnnnnnnnnnnnnnnnnnnnnnnnnnnnnnnnnnnnnnnnnnnnnnnnnnnnnnnnnnnnnnnnnnnnnnnnnnnnnnnnnnnnnnnnnnnnnnnnnnnnnnnnnnnnnnnnnnnnnnnnnnnnnnnnnnnnnnnnnnnnnnnnnnnnnnnnnnnnnnnnnnnnnnnnnnnnnnnnnnnnnnnnnnnnnnnnnnnnnnnnnnnnnnnnnnnnnnnnnnnnnnnnnnnnnnnnnnnnnnnnnnnnnnnnnnnnnnnnnnnnnnnnnnnnnnnnnnnnnnnnnnnnnnnnnnnnnnnnnnnnnnnnnnnnnnnnnnnnnnnnnnnnnnnnnnnnnnnnnnnnnnnnnnnnnnnnnnnnnnnnnnnnnnnnnnnnnnnnnnnnnnnnnnnnnnnnnnnnnnnnnnnnnnnnnnnnnnnnnnnnnnnnnnnnnnnnnnnnnnnnnnnnnnnnnnnnnnnnnnnnnnnnnnnnnnnnnnnnnnnnnnnnnnnnnnnnnnnnnnnnnnnnnnnnnnnnnnnnnnnnnnnnnnnnnnnnnnnnnnnnnnnnnnnnnnnnnnnnnnnnnnnnnnnnnnnnnnnnnnnnnnnnnnnnnnnnnnnnnnnnnnnnnnnnnnnnnnnnnnnnnnnnnnnnnnnnnnnnnnnnnnnnnnnnnnnnnnnnnnnnnnnnnnnnnnnnnnnnnnnnnnnnnnnnnnnnnnnnnnnnnnnnnnnnnnnnnnnnnnnnnnnnnnnnnnnnnnnnnnnnnnnnnnnnnnnnnnnnnnnnnnnnnnnnnnnnnnnnnnnnnnnnnnnnnnnnnnnnnnnnnnnnnnnnnnnnnnnnnnnnnnnnnnnnnnnnnnnnnnnnnnnnnnnnnnnnnnnnnnnnnnnnnnnnnnnnnnnnnnnnnnnnnnnnnnnnnnnnnnnnnnnnnnnnnnnnnnnnnnnnnnnnnnnnnnnnnnnnnnnnnnnnnnnnnnnnnnnnnnnnnnnnnnnnnnnnnnnnnnnnnnnnnnnnnnnnnnnnnnnnnnnnnnnnnnnnnnnnnnnnnnnnnnnnnnnnnnnnnnnnnnnnnnnnnnnnnnnnnnnnnnnnnnnnnnnnnnnnnnnnnnnnnnnnnnnnnnnnnnnnnnnnnnnnnnnnnnnnnnnnnnnnnnnnnnnnnnnnnnnnnnnnnnnnnnnnnnnnnnnnnnnnnnnnnnnnnnnnnnnnnnnnnnnnnnnnnnnnnnnnnnnnnnnnnnnnnnnnnnnnnnnnnnnnnnnnnnnnnnnnnnnnnnnnnnnnnnnnnnnnnnnnnnnnnnnnnnnnnnnnnnnnnnnnnnnnnnnnnnnnnnnnnnnnnnnnnnnnnnnnnnnnnnnnnnnnnnnnnnnnnnnnnnnnnnnnnnnnnnnnnnnnnnnnnnnnnnnnnnnnnnnnnnnnnnnnnnnnnnnnnnnnnnnnnnnnnnnnnnnnnnnnnnnnnnnnnnnnnnnnnnnnnnnnnnnnnnnnnnnnnnnnnnnnnnnnnnnnnnnnnnnnnnnnnnnnnnnnnnnnnnnnnnnnnnnnnnnnnnnnnnnnnnnnnnnnnnnnnnnnnnnnnnnnnnnnnnnnnnnnnnnnnnnnnnnnnnnnnnnnnnnnnnnnnnnnnnnnnnnnnnnnnnnnnnnnnnnnnnnnnnnnnnnnnnnnnnnnnnnnnnnnnnnnnnnnnnnnnnnnnnnnnnnnnnnnnnnnnnnnnnnnnnnnnnnnnnnnnnnnnnnnnnnnnnnnnnnnnnnnnnnnnnnnnnnnnnnnnnnnnnnnnnnnnnnnnnnnnnnnnnnnnnnnnnnnnnnnnnnnnnnnnnnnnnnnnnnnnnnnnnnnnnnnnnnnnnnnnnnnnnnnnnnnnnnnnnnnnnnnnnnnnnnnnnnnnnnnnnnnnnnnnnnnnnnnnnnnnnnnnnnnnnnnnnnnnnnnnnnnnnnnnnnnnnnnnnnnnnnnnnnnnnnnnnnnnnnnnnnnnnnnnnnnnnnnnnnnnnnnnnnnnnnnnnnnnnnnnnnnnnnnnnnnnnnnnnnnnnnnnnnnnnnnnnnnnnnnnnnnnnnnnnnnnnnnnnnnnnnnnnnnnnnnnnnnnnnnnnnnnnnnnnnnnnnnnnnnnnnnnnnnnnnnnnnnnnnnnnnnnnnnnnnnnnnnnnnnnnnnnnnnnnnnnnnnnnnnnnnnnnnnnnnnnnnnnnnnnnnnnnnnnnnnnnnnnnnnnnnnnnnnnnnnnnnnnnnnnnnnnnnnnnnnnnnnnnnnnnnnnnnnnnnnnnnnnnnnnnnnnnnnnnnnnnnnnnnnnnnnnnnnnnnnnnnnnnnnnnnnnnnnnnnnnnnnnnnnnnnnnnnnnnnnnnnnnnnnnnnnnnnnnnnnnnnnnnnnnnnnnnnnnnnnnnnnnnnnnnnnnnnnnnnnnnnnnnnnnnnnnnnnnnnnnnnnnnnnnnnnnnnnnnnnnnnnnnnnnnnnnnnnnnnnnnnnnnnnnnnnnnnnnnnnnnnnnnnnnnnnnnnnnnnnnnnnnnnnnnnnnnnnnnnnnnnnnnnnnnnnnnnnnnnnnnnnnnnnnnnnnnnnnnnnnnnnnnnnnnnnnnnnnnnnnnnnnnnnnnnnnnnnnnnnnnnnnnnnnnnnnnnnnnnnnnnnnnnnnnnnnnnnnnnnnnnnnnnnnnnnnnnnnnnnnnnnnnnnnnnnnnnnnnnnnnnnnnnnnnnnnnnnnnnnnnnnnnnnnnnnnnnnnnnnnnnnnnnnnnnnnnnnnnnnnnnnnnnnnnnnnnnnnnnnnnnnnnnnnnnnnnnnnnnnnnnnnnnnnnnnnnnnnnnnnnnnnnnnnnnnnnnnnnnnnnnnnnnnnnnnnnnnnnnnnnnnnnnnnnnnnnnnnnnnnnnnnnnnnnnnnnnnnnnnnnnnnnnnnnnnnnnnnnnnnnnnnnnnnnnnnnnnnnnnnnnnnnnnnnnnnnnnnnnnnnnnnnnnnnnnnnnnnnnnnnnnnnnnnnnnnnnnnnnnnnnnnnnnnnnnnnnnnnnnnnnnnnnnnnnnnnnnnnnnnnnnnnnnnnnnnnnnnnnnnnnnnnnnnnnnnnnnnnnnnnnnnnnnnnnnnnnnnnnnnnnnnnnnnnnnnnnnnnnnnnnnnnnnnnnnnnnnnnnnnnnnnnnnnnnnnnnnnnnnnnnnnnnnnnnnnnnnnnnnnnnnnnnnnnnnnnnnnnnnnnnnnnnnnnnnnnnnnnnnnnnnnnnnnnnnnnnnnnnnnnnnnnnnnnnnnnnnnnnnnnnnnnnnnnnnnnnnnnnnnnnnnnnnnnnnnnnnnnnnnnnnnnnnnnnnnnnnnnnnnnnnnnnnnnnnnnnnnnnnnnnnnnnnnnnnnnnnnnnnnnnnnnnnnnnnnnnnnnnnnnnnnnnnnnnnnnnnnnnnnnnnnnnnnnnnnnnnnnnnnnnnnnnnnnnnnnnnnnnnnnnnnnnnnnnnnnnnnnnnnnnnnnnnnnnnnnnnnnnnnnnnnnnnnnnnnnnnnnnnnnnnnnnnnnnnnnnnnnnnnnnnnnnnnnnnnnnnnnnnnnnnnnnnnnnnnnnnnnnnnnnnnnnnnnnnnnnnnnnnnnnnnnnnnnnnnnnnnnnnnnnnnnnnnnnnnnnnnnnnnnnnnnnnnnnnnnnnnnnnnnnnnnnnnnnnnnnnnnnnnnnnnnnnnnnnnnnnnnnnnnnnnnnnnnnnnnnnnnnnnnnnnnnnnnnnnnnnnnnnnnnnnnnnnnnnnnnnnnnnnnnnnnnnnnnnnnnnnnnnnnnnnnnnnnnnnnnnnnnnnnnnnnnnnnnnnnnnnnnnnnnnnnnnnnnnnnnnnnnnnnnnnnnnnnnnnnnnnnnnnnnnnnnnnnnnnnnnnnnnnnnnnnnnnnnnnnnnnnnnnnnnnnnnnnnnnnnnnnnnnnnnnnnnnnnnnnnnnnnnnnnnnnnnnnnnnnnnnnnnnnnnnnnnnnnnnnnnnnnnnnnnnnnnnnnnnnnnnnnnnnnnnnnnnnnnnnnnnnnnnnnnnnnnnnnnnnnnnnnnnnnnnnnnnnnnnnnnnnnnnnnnnnnnnnnnnnnnnnnnnnnnnnnnnnnnnnnnnnnnnnnnnnnnnnnnnnnnnnnnnnnnnnnnnnnnnnnnnnnnnnnnnnnnnnnnnnnnnnnnnnnnnnnnnnnnnnnnnnnnnnnnnnnnnnnnnnnnnnnnnnnnnnnnnnnnnnnnnnnnnnnnnnnnnnnnnnnnnnnnnnnnnnnnnnnnnnnnnnnnnnnnnnnnnnnnnnnnnnnnnnnnnnnnnnnnnnnnnnnnnnnnnnnnnnnnnnnnnnnnnnnnnnnnnnnnnnnnnnnnnnnnnnnnnnnnnnnnnnnnnnnnnnnnnnnnnnnnnnnnnnnnnnnnnnnnnnnnnnnnnnnnnnnnnnnnnnnnnnnnnnnnnnnnnnnnnnnnnnnnnnnnnnnnnnnnnnnnnnnnnnnnnnnnnnnnnnnnnnnnnnnnnnnnnnnnnnnnnnnnnnnnnnnnnnnnnnnnnnnnnnnnnnnnnnnnnnnnnnnnnnnnnnnnnnnnnnnnnnnnnnnnnnnnnnnnnnnnnnnnnnnnnnnnnnnnnnnnnnnnnnnnnnnnnnnnnnnnnnnnnnnnnnnnnnnnnnnnnnnnnnnnnnnnnnnnnnnnnnnnnnnnnnnnnnnnnnnnnnnnnnnnnnnnnnnnnnnnnnnnnnnnnnnnnnnnnnnnnnnnnnnnnnnnnnnnnnnnnnnnnnnnnnnnnnnnnnnnnnnnnnnnnnnnnnnnnnnnnnnnnnnnnnnnnnnnnnnnnnnnnnnnnnnnnnnnnnnnnnnnnnnnnnnnnnnnnnnnnnnnnnnnnnnnnnnnnnnnnnnnnnnnnnnnnnnnnnnnnnnnnnnnnnnnnnnnnnnnnnnnnnnnnnnnnnnnnnnnnnnnnnnnnnnnnnnnnnnnnnnnnnnnnnnnnnnnnnnnnnnnnnnnnnnnnnnnnnnnnnnnnnnnnnnnnnnnnnnnnnnnnnnnnnnnnnnnnnnnnnnnnnnnnnnnnnnnnnnnnnnnnnnnnnnnnnnnnnnnnnnnnnnnnnnnnnnnnnnnnnnnnnnnnnnnnnnnnnnnnnnnnnnnnnnnnnnnnnnnnnnnnnnnnnnnnnnnnnnnnnnnnnnnnnnnnnnnnnnnnnnnnnnnnnnnnnnnnnnnnnnnnnnnnnnnnnnnnnnnnnnnnnnnnnnnnnnnnnnnnnnnnnnnnnnnnnnnnnnnnnnnnnnnnnnnnnnnnnnnnnnnnnnnnnnnnnnnnnnnnnnnnnnnnnnnnnnnnnnnnnnnnnnnnnnnnnnnnnnnnnnnnnnnnnnnnnnnnnnnnnnnnnnnnnnnnnnnnnnnnnnnnnnnnnnnnnnnnnnnnnnnnnnnnnnnnnnnnnnnnnnnnnnnnnnnnnnnnnnnnnnnnnnnnnnnnnnnnnnnnnnnnnnnnnnnnnnnnnnnnnnnnnnnnnnnnnnnnnnnnnnnnnnnnnnnnnnnnnnnnnnnnnnnnnnnnnnnnnnnnnnnnnnnnnnnnnnnnnnnnnnnnnnnnnnnnnnnnnnnnnnnnnnnnnnnnnnnnnnnnnnnnnnnnnnnnnnnnnnnnnnnnnnnnnnnnnnnnnnnnnnnnnnnnnnnnnnnnnnnnnnnnnnnnnnnnnnnnnnnnnnnnnnnnnnnnnnnnnnnnnnnnnnnnnnnnnnnnnnnnnnnnnnnnnnnnnnnnnnnnnnnnnnnnnnnnnnnnnnnnnnnnnnnnnnnnnnnnnnnnnnnnnnnnnnnnnnnnnnnnnnnnnnnnnnnnnnnnnnnnnnnnnnnnnnnnnnnnnnnnnnnnnnnnnnnnnnnnnnnnnnnnnnnnnnnnnnnnnnnnnnnnnnnnnnnnnnnnnnnnnnnnnnnnnnnnnnnnnnnnnnnnnnnnnnnnnnnnnnnnnnnnnnnnnnnnnnnnnnnnnnnnnnnnnnnnnnnnnnnnnnnnnnnnnnnnnnnnnnnnnnnnnnnnnnnnnnnnnnnnnnnnnnnnnnnnnnnnnnnnnnnnnnnnnnnnnnnnnnnnnnnnnnnnnnnnnnnnnnnnnnnnnnnnnnnnnnnnnnnnnnnnnnnnnnnnnnnnnnnnnnnnnnnnnnnnnnnnnnnnnnnnnnnnnnnnnnnnnnnnnnnnnnnnnnnnnnnnnnnnnnnnnnnnnnnnnnnnnnnnnnnnnnnnnnnnnnnnnnnnnnnnnnnnnnnnnnnnnnnnnnnnnnnnnnnnnnnnnnnnnnnnnnnnnnnnnnnnnnnnnnnnnnnnnnnnnnnnnnnnnnnnnnnnnnnnnnnnnnnnnnnnnnnnnnnnnnnnnnnnnnnnnnnnnnnnnnnnnnnnnnnnnnnnnnnnnnnnnnnnnnnnnnnnnnnnnnnnnnnnnnnnnnnnnnnnnnnnnnnnnnnnnnnnnnnnnnnnnnnnnnnnnnnnnnnnnnnnnnnnnnnnnnnnnnnnnnnnnnnnnnnnnnnnnnnnnnnnnnnnnnnnnnnnnnnnnnnnnnnnnnnnnnnnnnnnnnnnnnnnnnnnnnnnnnnnnnnnnnnnnnnnnnnnnnnnnnnnnnnnnnnnnnnnnnnnnnnnnnnnnnnnnnnnnnnnnnnnnnnnnnnnnnnnnnnnnnnnnnnnnnnnnnnnnnnnnnnnnnnnnnnnnnnnnnnnnnnnnnnnnnnnnnnnnnnnnnnnnnnnnnnnnnnnnnnnnnnnnnnnnnnnnnnnnnnnnnnnnnnnnnnnnnnnnnnnnnnnnnnnnnnnnnnnnnnnnnnnnnnnnnnnnnnnnnnnnnnnnnnnnnnnnnnnnnnnnnnnnnnnnnnnnnnnnnnnnnnnnnnnnnnnnnnnnnnnnnnnnnnnnnnnnnnnnnnnnnnnnnnnnnnnnnnnnnnnnnnnnnnnnnnnnnnnnnnnnnnnnnnnnnnnnnnnnnnnnnnnnnnnnnnnnnnnnnnnnnnnnnnnnnnnnnnnnnnnnnnnnnnnnnnnnnnnnnnnnnnnnnnnnnnnnnnnnnnnnnnnnnnnnnnnnnnnnnnnnnnnnnnnnnnnnnnnnnnnnnnnnnnnnnnnnnnnnnnnnnnnnnnnnnnnnnnnnnnnnnnnnnnnnnnnnnnnnnnnnnnnnnnnnnnnnnnnnnnnnnnnnnnnnnnnnnnnnnnnnnnnnnnnnnnnnnnnnnnnnnnnnnnnnnnnnnnnnnnnnnnnnnnnnnnnnnnnnnnnnnnnnnnnnnnnnnnnnnnnnnnnnnnnnnnnnnnnnnnnnnnnnnnnnnnnnnnnnnnnnnnnnnnnnnnnnnnnnnnnnnnnnnnnnnnnnnnnnnnnnnnnnnnnnnnnnnnnnnnnnnnnnnnnnnnnnnnnnnnnnnnnnnnnnnnnnnnnnnnnnnnnnnnnnnnnnnnnnnnnnnnnnnnnnnnnnnnnnnnnnnnnnnnnnnnnnnnnnnnnnnnnnnnnnnnnnnnnnnnnnnnnnnnnnnnnnnnnnnnnnnnnnnnnnnnnnnnnnnnnnnnnnnnnnnnnnnnnnnnnnnnnnnnnnnnnnnnnnnnnnnnnnnnnnnnnnnnnnnnnnnnnnnnnnnnnnnnnnnnnnnnnnnnnnnnnnnnnnnnnnnnnnnnnnnnnnnnnnnnnnnnnnnnnnnnnnnnnnnnnnnnnnnnnnnnnnnnnnnnnnnnnnnnnnnnnnnnnnnnnnnnnnnnnnnnnnnnnnnnnnnnnnnnnnnnnnnnnnnnnnnnnnnnnnnnnnnnnnnnnnnnnnnnnnnnnnnnnnnnnnnnnnnnnnnnnnnnnnnnnnnnnnnnnnnnnnnnnnnnnnnnnnnnnnnnnnnnnnnnnnnnnnnnnnnnnnnnnnnnnnnnnnnnnnnnnnnnnnnnnnnnnnnnnnnnnnnnnnnnnnnnnnnnnnnnnnnnnnnnnnnnnnnnnnnnnnnnnnnnnnnnnnnnnnnnnnnnnnnnnnnnnnnnnnnnnnnnnnnnnnnnnnnnnnnnnnnnnnnnnnnnnnnnnnnnnnnnnnnnnnnnnnnnnnnnnnnnnnnnnnnnnnnnnnnnnnnnnnnnnnnnnnnnnnnnnnnnnnnnnnnnnnnnnnnnnnnnnnnnnnnnnnnnnnnnnnnnnnnnnnnnnnnnnnnnnnnnnnnnnnnnnnnnnnnnnnnnnnnnnnnnnnnnnnnnnnnnnnnnnnnnnnnnnnnnnnnnnnnnnnnnnnnnnnnnnnnnnnnnnnnnnnnnnnnnnnnnnnnnnnnnnnnnnnnnnnnnnnnnnnnnnnnnnnnnnnnnnnnnnnnnnnnnnnnnnnnnnnnnnnnnnnnnnnnnnnnnnnnnnnnnnnnnnnnnnnnnnnnnnnnnnnnnnnnnnnnnnnnnnnnnnnnnnnnnnnnnnnnnnnnnnnnnnnnnnnnnnnnnnnnnnnnnnnnnnnnnnnnnnnnnnnnnnnnnnnnnnnnnnnnnnnnnnnnnnnnnnnnnnnnnnnnnnnnnnnnnnnnnnnnnnnnnnnnnnnnnnnnnnnnnnnnnnnnnnnnnnnnnnnnnnnnnnnnnnnnnnnnnnnnnnnnnnnnnnnnnnnnnnnnnnnnnnnnnnnnnnnnnnnnnnnnnnnnnnnnnnnnnnnnnnnnnnnnnnnnnnnnnnnnnnnnnnnnnnnnnnnnnnnnnnnnnnnnnnnnnnnnnnnnnnnnnnnnnnnnnnnnnnnnnnnnnnnnnnnnnnnnnnnnnnnnnnnnnnnnnnnnnnnnnnnnnnnnnnnnnnnnnnnnnnnnnnnnnnnnnnnnnnnnnnnnnnnnnnnnnnnnnnnnnnnnnnnnnnnnnnnnnnnnnnnnnnnnnnnnnnnnnnnnnnnnnnnnnnnnnnnnnnnnnnnnnnnnnnnnnnnnnnnnnnnnnnnnnnnnnnnnnnnnnnnnnnnnnnnnnnnnnnnnnnnnnnnnnnnnnnnnnnnnnnnnnnnnnnnnnnnnnnnnnnnnnnnnnnnnnnnnnnnnnnnnnnnnnnnnnnnnnnnnnnnnnnnnnnnnnnnnnnnnnnnnnnnnnnnnnnnnnnnnnnnnnnnnnnnnnnnnnnnnnnnnnnnnnnnnnnnnnnnnnnnnnnnnnnnnnnnnnnnnnnnnnnnnnnnnnnnnnnnnnnnnnnnnnnnnnnnnnnnnnnnnnnnnnnnnnnnnnnnnnnnnnnnnnnnnnnnnnnnnnnnnnnnnnnnnnnnnnnnnnnnnnnnnnnnnnnnnnnnnnnnnnnnnnnnnnnnnnnnnnnnnnnnnnnnnnnnnnnnnnnnnnnnnnnnnnnnnnnnnnnnnnnnnnnnnnnnnnnnnnnnnnnnnnnnnnnnnnnnnnnnnnnnnnnnnnnnnnnnnnnnnnnnnnnnnnnnnnnnnnnnnnnnnnnnnnnnnnnnnnnnnnnnnnnnnnnnnnnnnnnnnnnnnnnnnnnnnnnnnnnnnnnnnnnnnnnnnnnnnnnnnnnnnnnnnnnnnnnnnnnnnnnnnnnnnnnnnnnnnnnnnnnnnnnnnnnnnnnnnnnnnnnnnnnnnnnnnnnnnnnnnnnnnnnnnnnnnnnnnnnnnnnnnnnnnnnnnnnnnnnnnnnnnnnnnnnnnnnnnnnnnnnnnnnnnnnnnnnnnnnnnnnnnnnnnnnnnnnnnnnnnnnnnnnnnnnnnnnnnnnnnnnnnnnnnnnnnnnnnnnnnnnnnnnnnnnnnnnnnnnnnnnnnnnnnnnnnnnnnnnnnnnnnnnnnnnnnnnnnnnnnnnnnnnnnnnnnnnnnnnnnnnnnnnnnnnnnnnnnnnnnnnnnnnnnnnnnnnnnnnnnnnnnnnnnnnnnnnnnnnnnnnnnnnnnnnnnnnnnnnnnnnnnnnnnnnnnnnnnnnnnnnnnnnnnnnnnnnnnnnnnnnnnnnnnnnnnnnnnnnnnnnnnnnnnnnnnnnnnnnnnnnnnnnnnnnnnnnnnnnnnnnnnnnnnnnnnnnnnnnnnnnnnnnnnnnnnnnnnnnnnnnnnnnnnnnnnnnnnnnnnnnnnnnnnnnnnnnnnnnnnnnnnnnnnnnnnnnnnnnnnnnnnnnnnnnnnnnnnnnnnnnnnnnnnnnnnnnnnnnnnnnnnnnnnnnnnnnnnnnnnnnnnnnnnnnnnnnnnnnnnnnnnnnnnnnnnnnnnnnnnnnnnnnnnnnnnnnnnnnnnnnnnnnnnnnnnnnnnnnnnnnnnnnnnnnnnnnnnnnnnnnnnnnnnnnnnnnnnnnnnnnnnnnnnnnnnnnnnnnnnnnnnnnnnnnnnnnnnnnnnnnnnnnnnnnnnnnnnnnnnnnnnnnnnnnnnnnnnnnnnnnnnnnnnnnnnnnnnnnnnnnnnnnnnnnnnnnnnnnnnnnnnnnnnnnnnnnnnnnnnnnnnnnnnnnnnnnnnnnnnnnnnnnnnnnnnnnnnnnnnnnnnnnnnnnnnnnnnnnnnnnnnnnnnnnnnnnnnnnnnnnnnnnnnnnnnnnnnnnnnnnnnnnnnnnnnnnnnnnnnnnnnnnnnnnnnnnnnnnnnnnnnnnnnnnnnnnnnnnnnnnnnnnnnnnnnnnnnnnnnnnnnnnnnnnnnnnnnnnnnnnnnnnnnnnnnnnnnnnnnnnnnnnnnnnnnnnnnnnnnnnnnnnnnnnnnnnnnnnnnnnnnnnnnnnnnnnnnnnnnnnnnnnnnnnnnnnnnnnnnnnnnnnnnnnnnnnnnnnnnnnnnnnnnnnnnnnnnnnnnnnnnnnnnnnnnnnnnnnnnnnnnnnnnnnnnnnnnnnnnnnnnnnnnnnnnnnnnnnnnnnnnnnnnnnnnnnnnnnnnnnnnnnnnnnnnnnnnnnnnnnnnnnnnnnnnnnnnnnnnnnnnnnnnnnnnnnnnnnnnnnnnnnnnnnnnnnnnnnnnnnnnnnnnnnnnnnnnnnnnnnnnnnnnnnnnnnnnnnnnnnnnnnnnnnnnnnnnnnnnnnnnnnnnnnnnnnnnnnnnnnnnnnnnnnnnnnnnnnnnnnnnnnnnnnnnnnnnnnnnnnnnnnnnnnnnnnnnnnnnnnnnnnnnnnnnnnnnnnnnnnnnnnnnnnnnnnnnnnnnnnnnnnnnnnnnnnnnnnnnnnnnnnnnnnnnnnnnnnnnnnnnnnnnnnnnnnnnnnnnnnnnnnnnnnnnnnnnnnnnnnnnnnnnnnnnnnnnnnnnnnnnnnnnnnnnnnnnnnnnnnnnnnnnnnnnnnnnnnnnnnnnnnnnnnnnnnnnnnnnnnnnnnnnnnnnnnnnnnnnnnnnnnnnnnnnnnnnnnnnnnnnnnnnnnnnnnnnnnnnnnnnnnnnnnnnnnnnnnnnnnnnnnnnnnnnnnnnnnnnnnnnnnnnnnnnnnnnnnnnnnnnnnnnnnnnnnnnnnnnnnnnnnnnnnnnnnnnnnnnnnnnnnnnnnnnnnnnnnnnnnnnnnnnnnnnnnnnnnnnnnnnnnnnnnnnnnnnnnnnnnnnnnnnnnnnnnnnnnnnnnnnnnnnnnnnnnnnnnnnnnnnnnnnnnnnnnnnnnnnnnnnnnnnnnnnnnnnnnnnnnnnnnnnnnnnnnnnnnnnnnnnnnnnnnnnnnnnnnnnnnnnnnnnnnnnnnnnnnnnnnnnnnnnnnnnnnnnnnnnnnnnnnnnnnnnnnnnnnnnnnnnnnnnnnnnnnnnnnnnnnnnnnnnnnnnnnnnnnnnnnnnnnnnnnnnnnnnnnnnnnnnnnnnnnnnnnnnnnnnnnnnnnnnnnnnnnnnnnnnnnnnnnnnnnnnnnnnnnnnnnnnnnnnnnnnnnnnnnnnnnnnnnnnnnnnnnnnnnnnnnnnnnnnnnnnnnnnnnnnnnnnnnnnnnnnnnnnnnnnnnnnnnnnnnnnnnnnnnnnnnnnnnnnnnnnnnnnnnnnnnnnnnnnnnnnnnnnnnnnnnnnnnnnnnnnnnnnnnnnnnnnnnnnnnnnnnnnnnnnnnnnnnnnnnnnnnnnnnnnnnnnnnnnnnnnnnnnnnnnnnnnnnnnnnnnnnnnnnnnnnnnnnnnnnnnnnnnnnnnnnnnnnnnnnnnnnnnnnnnnnnnnnnnnnnnnnnnnnnnnnnnnnnnnnnnnnnnnnnnnnnnnnnnnnnnnnnnnnnnnnnnnnnnnnnnnnnnnnnnnnnnnnnnnnnnnnnnnnnnnnnnnnnnnnnnnnnnnnnnnnnnnnnnnnnnnnnnnnnnnnnnnnnnnnnnnnnnnnnnnnnnnnnnnnnnnnnnnnnnnnnnnnnnnnnnnnnnnnnnnnnnnnnnnnnnnnnnnnnnnnnnnnnnnnnnnnnnnnnnnnnnnnnnnnnnnnnnnnnnnnnnnnnnnnnnnnnnnnnnnnnnnnnnnnnnnnnnnnnnnnnnnnnnnnnnnnnnnnnnnnnnnnnnnnnnnnnnnnnnnnnnnnnnnnnnnnnnnnnnnnnnnnnnnnnnnnnnnnnnnnnnnnnnnnnnnnnnnnnnnnnnnnnnnnnnnnnnnnnnnnnnnnnnnnnnnnnnnnnnnnnnnnnnnnnnnnnnnnnnnnnnnnnnnnnnnnnnnnnnnnnnnnnnnnnnnnnnnnnnnnnnnnnnnnnnnnnnnnnnnnnnnnnnnnnnnnnnnnnnnnnnnnnnnnnnnnnnnnnnnnnnnnnnnnnnnnnnnnnnnnnnnnnnnnnnnnnnnnnnnnnnnnnnnnnnnnnnnnnnnnnnnnnnnnnnnnnnnnnnnnnnnnnnnnnnnnnnnnnnnnnnnnnnnnnnnnnnnnnnnnnnnnnnnnnnnnnnnnnnnnnnnnnnnnnnnnnnnnnnnnnnnnnnnnnnnnnnnnnnnnnnnnnnnnnnnnnnnnnnnnnnnnnnnnnnnnnnnnnnnnnnnnnnnnnnnnnnnnnnnnnnnnnnnnnnnnnnnnnnnnnnnnnnnnnnnnnnnnnnnnnnnnnnnnnnnnnnnnnnnnnnnnnnnnnnnnnnnnnnnnnnnnnnnnnnnnnnnnnnnnnnnnnnnnnnnnnnnnnnnnnnnnnnnnnnnnnnnnnnnnnnnnnnnnnnnnnnnnnnnnnnnnnnnnnnnnnnnnnnnnnnnnnnnnnnnnnnnnnnnnnnnnnnnnnnnnnnnnnnnnnnnnnnnnnnnnnnnnnnnnnnnnnnnnnnnnnnnnnnnnnnnnnnnnnnnnnnnnnnnnnnnnnnnnnnnnnnnnnnnnnnnnnnnnnnnnnnnnnnnnnnnnnnnnnnnnnnnnnnnnnnnnnnnnnnnnnnnnnnnnnnnnnnnnnnnnnnnnnnnnnnnnnnnnnnnnnnnnnnnnnnnnnnnnnnnnnnnnnnnnnnnnnnnnnnnnnnnnnnnnnnnnnnnnnnnnnnnnnnnnnnnnnnnnnnnnnnnnnnnnnnnnnnnnnnnnnnnnnnnnnnnnnnnnnnnnnnnnnnnnnnnnnnnnnnnnnnnnnnnnnnnnnnnnnnnnnnnnnnnnnnnnnnnnnnnnnnnnnnnnnnnnnnnnnnnnnnnnnnnnnnnnnnnnnnnnnnnnnnnnnnnnnnnnnnnnnnnnnnnnnnnnnnnnnnnnnnnnnnnnnnnnnnnnnnnnnnnnnnnnnnnnnnnnnnnnnnnnnnnnnnnnnnnnnnnnnnnnnnnnnnnnnnnnnnnnnnnnnnnnnnnnnnnnnnnnnnnnnnnnnnnnnnnnnnnnnnnnnnnnnnnnnnnnnnnnnnnnnnnnnnnnnnnnnnnnnnnnnnnnnnnnnnnnnnnnnnnnnnnnnnnnnnnnnnnnnnnnnnnnnnnnnnnnnnnnnnnnnnnnnnnnnnnnnnnnnnnnnnnnnnnnnnnnnnnnnnnnnnnnnnnnnnnnnnnnnnnnnnnnnnnnnnnnnnnnnnnnnnnnnnnnnnnnnnnnnnnnnnnnnnnnnnnnnnnnnnnnnnnnnnnnnnnnnnnnnnnnnnnnnnnnnnnnnnnnnnnnnnnnnnnnnnnnnnnnnnnnnnnnnnnnnnnnnnnnnnnnnnnnnnnnnnnnnnnnnnnnnnnnnnnnnnnnnnnnnnnnnnnnnnnnnnnnnnnnnnnnnnnnnnnnnnnnnnnnnnnnnnnnnnnnnnnnnnnnnnnnnnnnnnnnnnnnnnnnnnnnnnnnnnnnnnnnnnnnnnnnnnnnnnnnnnnnnnnnnnnnnnnnnnnnnnnnnnnnnnnnnnnnnnnnnnnnnnnnnnnnnnnnnnnnnnnnnnnnnnnnnnnnnnnnnnnnnnnnnnnnnnnnnnnnnnnnnnnnnnnnnnnnnnnnnnnnnnnnnnnnnnnnnnnnnnnnnnnnnnnnnnnnnnnnnnnnnnnnnnnnnnnnnnnnnnnnnnnnnnnnnnnnnnnnnnnnnnnnnnnnnnnnnnnnnnnnnnnnnnnnnnnnnnnnnnnnnnnnnnnnnnnnnnnnnnnnnnnnnnnnnnnnnnnnnnnnnnnnnnnnnnnnnnnnnnnnnnnnnnnnnnnnnnnnnnnnnnnnnnnnnnnnnnnnnnnnnnnnnnnnnnnnnnnnnnnnnnnnnnnnnnnnnnnnnnnnnnnnnnnnnnnnnnnnnnnnnnnnnnnnnnnnnnnnnnnnnnnnnnnnnnnnnnnnnnnnnnnnnnnnnnnnnnnnnnnnnnnnnnnnnnnnnnnnnnnnnnnnnnnnnnnnnnnnnnnnnnnnnnnnnnnnnnnnnnnnnnnnnnnnnnnnnnnnnnnnnnnnnnnnnnnnnnnnnnnnnnnnnnnnnnnnnnnnnnnnnnnnnnnnnnnnnnnnnnnnnnnnnnnnnnnnnnnnnnnnnnnnnnnnnnnnnnnnnnnnnnnnnnnnnnnnnnnnnnnnnnnnnnnnnnnnnnnnnnnnnnnnnnnnnnnnnnnnnnnnnnnnnnnnnnnnnnnnnnnnnnnnnnnnnnnnnnnnnnnnnnnnnnnnnnnnnnnnnnnnnnnnnnnnnnnnnnnnnnnnnnnnnnnnnnnnnnnnnnnnnnnnnnnnnnnnnnnnnnnnnnnnnnnnnnnnnnnnnnnnnnnnnnnnnnnnnnnnnnnnnnnnnnnnnnnnnnnnnnnnnnnnnnnnnnnnnnnnnnnnnnnnnnnnnnnnnnnnnnnnnnnnnnnnnnnnnnnnnnnnnnnnnnnnnnnnnnnnnnnnnnnnnnnnnnnnnnnnnnnnnnnnnnnnnnnnnnnnnnnnnnnnnnnnnnnnnnnnnnnnnnnnnnnnnnnnnnnnnnnnnnnnnnnnnnnnnnnnnnnnnnnnnnnnnnnnnnnnnnnnnnnnnnnnnnnnnnnnnnnnnnnnnnnnnnnnnnnnnnnnnnnnnnnnnnnnnnnnnnnnnnnnnnnnnnnnnnnnnnnnnnnnnnnnnnnnnnnnnnnnnnnnnnnnnnnnnnnnnnnnnnnnnnnnnnnnnnnnnnnnnnnnnnnnnnnnnnnnnnnnnnnnnnnnnnnnnnnnnnnnnnnnnnnnnnnnnnnnnnnnnnnnnnnnnnnnnnnnnnnnnnnnnnnnnnnnnnnnnnnnnnnnnnnnnnnnnnnnnnnnnnnnnnnnnnnnnnnnnnnnnnnnnnnnnnnnnnnnnnnnnnnnnnnnnnnnnnnnnnnnnnnnnnnnnnnnnnnnnnnnnnnnnnnnnnnnnnnnnnnnnnnnnnnnnnnnnnnnnnnnnnnnnnnnnnnnnnnnnnnnnnnnnnnnnnnnnnnnnnnnnnnnnnnnnnnnnnnnnnnnnnnnnnnnnnnnnnnnnnnnnnnnnnnnnnnnnnnnnnnnnnnnnnnnnnnnnnnnnnnnnnnnnnnnnnnnnnnnnnnnnnnnnnnnnnnnnnnnnnnnnnnnnnnnnnnnnnnnnnnnnnnnnnnnnnnnnnnnnnnnnnnnnnnnnnnnnnnnnnnnnnnnnnnnnnnnnnnnnnnnnnnnnnnnnnnnnnnnnnnnnnnnnnnnnnnnnnnnnnnnnnnnnnnnnnnnnnnnnnnnnnnnnnnnnnnnnnnnnnnnnnnnnnnnnnnnnnnnnnnnnnnnnnnnnnnnnnnnnnnnnnnnnnnnnnnnnnnnnnnnnnnnnnnnnnnnnnnnnnnnnnnnnnnnnnnnnnnnnnnnnnnnnnnnnnnnnnnnnnnnnnnnnnnnnnnnnnnnnnnnnnnnnnnnnnnnnnnnnnnnnnnnnnnnnnnnnnnnnnnnnnnnnnnnnnnnnnnnnnnnnnnnnnnnnnnnnnnnnnnnnnnnnnnnnnnnnnnnnnnnnnnnnnnnnnnnnnnnnnnnnnnnnnnnnnnnnnnnnnnnnnnnnnnnnnnnnnnnnnnnnnnnnnnnnnnnnnnnnnnnnnnnnnnnnnnnnnnnnnnnnnnnnnnnnnnnnnnnnnnnnnnnnnnnnnnnnnnnnnnnnnnnnnnnnnnnnnnnnnnnnnnnnnnnnnnnnnnnnnnnnnnnnnnnnnnnnnnnnnnnnnnnnnnnnnnnnnnnnnnnnnnnnnnnnnnnnnnnnnnnnnnnnnnnnnnnnnnnnnnnnnnnnnnnnnnnnnnnnnnnnnnnnnnnnnnnnnnnnnnnnnnnnnnnnnnnnnnnnnnnnnnnnnnnnnnnnnnnnnnnnnnnnnnnnnnnnnnnnnnnnnnnnnnnnnnnnnnnnnnnnnnnnnnnnnnnnnnnnnnnnnnnnnnnnnnnnnnnnnnnnnnnnnnnnnnnnnnnnnnnnnnnnnnnnnnnnnnnnnnnnnnnnnnnnnnnnnnnnnnnnnnnnnnnnnnnnnnnnnnnnnnnnnnnnnnnnnnnnnnnnnnnnnnnnnnnnnnnnnnnnnnnnnnnnnnnnnnnnnnnnnnnnnnnnnnnnnnnnnnnnnnnnnnnnnnnnnnnnnnnnnnnnnnnnnnnnnnnnnnnnnnnnnnnnnnnnnnnnnnnnnnnnnnnnnnnnnnnnnnnnnnnnnnnnnnnnnnnnnnnnnnnnnnnnnnnnnnnnnnnnnnnnnnnnnnnnnnnnnnnnnnnnnnnnnnnnnnnnnnnnnnnnnnnnnnnnnnnnnnnnnnnnnnnnnnnnnnnnnnnnnnnnnnnnnnnnnnnnnnnnnnnnnnnnnnnnnnnnnnnnnnnnnnnnnnnnnnnnnnnnnnnnnnnnnnnnnnnnnnnnnnnnnnnnnnnnnnnnnnnnnnnnnnnnnnnnnnnnnnnnnnnnnnnnnnnnnnnnnnnnnnnnnnnnnnnnnnnnnnnnnnnnnnnnnnnnnnnnnnnnnnnnnnnnnnnnnnnnnnnnnnnnnnnnnnnnnnnnnnnnnnnnnnnnnnnnnnnnnnnnnnnnnnnnnnnnnnnnnnnnnnnnnnnnnnnnnnnnnnnnnnnnnnnnnnnnnnnnnnnnnnnnnnnnnnnnnnnnnnnnnnnnnnnnnnnnnnnnnnnnnnnnnnnnnnnnnnnnnnnnnnnnnnnnnnnnnnnnnnnnnnnnnnnnnnnnnnnnnnnnnnnnnnnnnnnnnnnnnnnnnnnnnnnnnnnnnnnnnnnnnnnnnnnnnnnnnnnnnnnnnnnnnnnnnnnnnnnnnnnnnnnnnnnnnnnnnnnnnnnnnnnnnnnnnnnnnnnnnnnnnnnnnnnnnnnnnnnnnnnnnnnnnnnnnnnnnnnnnnnnnnnnnnnnnnnnnnnnnnnnnnnnnnnnnnnnnnnnnnnnnnnnnnnnnnnnnnnnnnnnnnnnnnnnnnnnnnnnnnnnnnnnnnnnnnnnnnnnnnnnnnnnnnnnnnnnnnnnnnnnnnnnnnnnnnnnnnnnnnnnnnnnnnnnnnnnnnnnnnnnnnnnnnnnnnnnnnnnnnnnnnnnnnnnnnnnnnnnnnnnnnnnnnnnnnnnnnnnnnnnnnnnnnnnnnnnnnnnnnnnnnnnnnnnnnnnnnnnnnnnnnnnnnnnnnnnnnnnnnnnnnnnnnnnnnnnnnnnnnnnnnnnnnnnnnnnnnnnnnnnnnnnnnnnnnnnnnnnnnnnnnnnnnnnnnnnnnnnnnnnnnnnnnnnnnnnnnnnnnnnnnnnnnnnnnnnnnnnnnnnnnnnnnnnnnnnnnnnnnnnnnnnnnnnnnnnnnnnnnnnnnnnnnnnnnnnnnnnnnnnnnnnnnnnnnnnnnnnnnnnnnnnnnnnnnnnnnnnnnnnnnnnnnnnnnnnnnnnnnnnnnnnnnnnnnnnnnnnnnnnnnnnnnnnnnnnnnnnnnnnnnnnnnnnnnnnnnnnnnnnnnnnnnnnnnnnnnnnnnnnnnnnnnnnnnnnnnnnnnnnnnnnnnnnnnnnnnnnnnnnnnnnnnnnnnnnnnnnnnnnnnnnnnnnnnnnnnnnnnnnnnnnnnnnnnnnnnnnnnnnnnnnnnnnnnnnnnnnnnnnnnnnnnnnnnnnnnnnnnnnnnnnnnnnnnnnnnnnnnnnnnnnnnnnnnnnnnnnnnnnnnnnnnnnnnnnnnnnnnnnnnnnnnnnnnnnnnnnnnnnnnnnnnnnnnnnnnnnnnnnnnnnnnnnnnnnnnnnnnnnnnnnnnnnnnnnnnnnnnnnnnnnnnnnnnnnnnnnnnnnnnnnnnnnnnnnnnnnnnnnnnnnnnnnnnnnnnnnnnnnnnnnnnnnnnnnnnnnnnnnnnnnnnnnnnnnnnnnnnnnnnnnnnnnnnnnnnnnnnnnnnnnnnnnnnnnnnnnnnnnnnnnnnnnnnnnnnnnnnnnnnnnnnnnnnnnnnnnnnnnnnnnnnnnnnnnnnnnnnnnnnnnnnnnnnnnnnnnnnnnnnnnnnnnnnnnnnnnnnnnnnnnnnnnnnnnnnnnnnnnnnnnnnnnnnnnnnnnnnnnnnnnnnnnnnnnnnnnnnnnnnnnnnnnnnnnnnnnnnnnnnnnnnnnnnnnnnnnnnnnnnnnnnnnnnnnnnnnnnnnnnnnnnnnnnnnnnnnnnnnnnnnnnnnnnnnnnnnnnnnnnnnnnnnnnnnnnnnnnnnnnnnnnnnnnnnnnnnnnnnnnnnnnnnnnnnnnnnnnnnnnnnnnnnnnnnnnnnnnnnnnnnnnnnnnnnnnnnnnnnnnnnnnnnnnnnnnnnnnnnnnnnnnnnnnnnnnnnnnnnnnnnnnnnnnnnnnnnnnnnnnnnnnnnnnnnnnnnnnnnnnnnnnnnnnnnnnnnnnnnnnnnnnnnnnnnnnnnnnnnnnnnnnnnnnnnnnnnnnnnnnnnnnnnnnnnnnnnnnnnnnnnnnnnnnnnnnnnnnnnnnnnnnnnnnnnnnnnnnnnnnnnnnnnnnnnnnnnnnnnnnnnnnnnnnnnnnnnnnnnnnnnnnnnnnnnnnnnnnnnnnnnnnnnnnnnnnnnnnnnnnnnnnnnnnnnnnnnnnnnnnnnnnnnnnnnnnnnnnnnnnnnnnnnnnnnnnnnnnnnnnnnnnnnnnnnnnnnnnnnnnnnnnnnnnnnnnnnnnnnnnnnnnnnnnnnnnnnnnnnnnnnnnnnnnnnnnnnnnnnnnnnnnnnnnnnnnnnnnnnnnnnnnnnnnnnnnnnnnnnnnnnnnnnnnnnnnnnnnnnnnnnnnnnnnnnnnnnnnnnnnnnnnnnnnnnnnnnnnnnnnnnnnnnnnnnnnnnnnnnnnnnnnnnnnnnnnnnnnnnnnnnnnnnnnnnnnnnnnnnnnnnnnnnnnnnnnnnnnnnnnnnnnnnnnnnnnnnnnnnnnnnnnnnnnnnnnnnnnnnnnnnnnnnnnnnnnnnnnnnnnnnnnnnnnnnnnnnnnnnnnnnnnnnnnnnnnnnnnnnnnnnnnnnnnnnnnnnnnnnnnnnnnnnnnnnnnnnnnnnnnnnnnnnnnnnnnnnnnnnnnnnnnnnnnnnnnnnnnnnnnnnnnnnnnnnnnnnnnnnnnnnnnnnnnnnnnnnnnnnnnnnnnnnnnnnnnnnnnnnnnnnnnnnnnnnnnnnnnnnnnnnnnnnnnnnnnnnnnnnnnnnnnnnnnnnnnnnnnnnnnnnnnnnnnnnnnnnnnnnnnnnnnnnnnnnnnnnnnnnnnnnnnnnnnnnnnnnnnnnnnnnnnnnnnnnnnnnnnnnnnnnnnnnnnnnnnnnnnnnnnnnnnnnnnnnnnnnnnnnnnnnnnnnnnnnnnnnnnnnnnnnnnnnnnnnnnnnnnnnnnnnnnnnnnnnnnnnnnnnnnnnnnnnnnnnnnnnnnnnnnnnnnnnnnnnnnnnnnnnnnnnnnnnnnnnnnnnnnnnnnnnnnnnnnnnnnnnnnnnnnnnnnnnnnnnnnnnnnnnnnnnnnnnnnnnnnnnnnnnnnnnnnnnnnnnnnnnnnnnnnnnnnnnnnnnnnnnnnnnnnnnnnnnnnnnnnnnnnnnnnnnnnnnnnnnnnnnnnnnnnnnnnnnnnnnnnnnnnnnnnnnnnnnnnnnnnnnnnnnnnnnnnnnnnnnnnnnnnnnnnnnnnnnnnnnnnnnnnnnnnnnnnnnnnnnnnnnnnnnnnnnnnnnnnnnnnnnnnnnnnnnnnnnnnnnnnnnnnnnnnnnnnnnnnnnnnnnnnnnnnnnnnnnnnnnnnnnnnnnnnnnnnnnnnnnnnnnnnnnnnnnnnnnnnnnnnnnnnnnnnnnnnnnnnnnnnnnnnnnnnnnnnnnnnnnnnnnnnnnnnnnnnnnnnnnnnnnnnnnnnnnnnnnnnnnnnnnnnnnnnnnnnnnnnnnnnnnnnnnnnnnnnnnnnnnnnnnnnnnnnnnnnnnnnnnnnnnnnnnnnnnnnnnnnnnnnnnnnnnnnnnnnnnnnnnnnnnnnnnnnnnnnnnnnnnnnnnnnnnnnnnnnnnnnnnnnnnnnnnnnnnnnnnnnnnnnnnnnnnnnnnnnnnnnnnnnnnnnnnnnnnnnnnnnnnnnnnnnnnnnnnnnnnnnnnnnnnnnnnnnnnnnnnnnnnnnnnnnnnnnnnnnnnnnnnnnnnnnnnnnnnnnnnnnnnnnnnnnnnnnnnnnnnnnnnnnnnnnnnnnnnnnnnnnnnnnnnnnnnnnnnnnnnnnnnnnnnnnnnnnnnnnnnnnnnnnnnnnnnnnnnnnnnnnnnnnnnnnnnnnnnnnnnnnnnnnnnnnnnnnnnnnnnnnnnnnnnnnnnnnnnnnnnnnnnnnnnnnnnnnnnnnnnnnnnnnnnnnnnnnnnnnnnnnnnnnnnnnnnnnnnnnnnnnnnnnnnnnnnnnnnnnnnnnnnnnnnnnnnnnnnnnnnnnnnnnnnnnnnnnnnnnnnnnnnnnnnnnnnnnnnnnnnnnnnnnnnnnnnnnnnnnnnnnnnnnnnnnnnnnnnnnnnnnnnnnnnnnnnnnnnnnnnnnnnnnnnnnnnnnnnnnnnnnnnnnnnnnnnnnnnnnnnnnnnnnnnnnnnnnnnnnnnnnnnnnnnnnnnnnnnnnnnnnnnnnnnnnnnnnnnnnnnnnnnnnnnnnnnnnnnnnnnnnnnnnnnnnnnnnnnnnnnnnnnnnnnnnnnnnnnnnnnnnnnnnnnnnnnnnnnnnnnnnnnnnnnnnnnnnnnnnnnnnnnnnnnnnnnnnnnnnnnnnnnnnnnnnnnnnnnnnnnnnnnnnnnnnnnnnnnnnnnnnnnnnnnnnnnnnnnnnnnnnnnnnnnnnnnnnnnnnnnnnnnnnnnnnnnnnnnnnnnnnnnnnnnnnnnnnnnnnnnnnnnnnnnnnnnnnnnnnnnnnnnnnnnnnnnnnnnnnnnnnnnnnnnnnnnnnnnnnnnnnnnnnnnnnnnnnnnnnnnnnnnnnnnnnnnnnnnnnnnnnnnnnnnnnnnnnnnnnnnnnnnnnnnnnnnnnnnnnnnnnnnnnnnnnnnnnnnnnnnnnnnnnnnnnnnnnnnnnnnnnnnnnnnnnnnnnnnnnnnnnnnnnnnnnnnnnnnnnnnnnnnnnnnnnnnnnnnnnnnnnnnnnnnnnnnnnnnnnnnnnnnnnnnnnnnnnnnnnnnnnnnnnnnnnnnnnnnnnnnnnnnnnnnnnnnnnnnnnnnnnnnnnnnnnnnnnnnnnnnnnnnnnnnnnnnnnnnnnnnnnnnnnnnnnnnnnnnnnnnnnnnnnnnnnnnnnnnnnnnnnnnnnnnnnnnnnnnnnnnnnnnnnnnnnnnnnnnnnnnnnnnnnnnnnnnnnnnnnnnnnnnnnnnnnnnnnnnnnnnnnnnnnnnnnnnnnnnnnnnnnnnnnnnnnnnnnnnnnnnnnnnnnnnnnnnnnnnnnnnnnnnnnnnnnnnnnnnnnnnnnnnnnnnnnnnnnnnnnnnnnnnnnnnnnnnnnnnnnnnnnnnnnnnnnnnnnnnnnnnnnnnnnnnnnnnnnnnnnnnnnnnnnnnnnnnnnnnnnnnnnnnnnnnnnnnnnnnnnnnnnnnnnnnnnnnnnnnnnnnnnnnnnnnnnnnnnnnnnnnnnnnnnnnnnnnnnnnnnnnnnnnnnnnnnnnnnnnnnnnnnnnnnnnnnnnnnnnnnnnnnnnnnnnnnnnnnnnnnnnnnnnnnnnnnnnnnnnnnnnnnnnnnnnnnnnnnnnnnnnnnnnnnnnnnnnnnnnnnnnnnnnnnnnnnnnnnnnnnnnnnnnnnnnnnnnnnnnnnnnnnnnnnnnnnnnnnnnnnnnnnnnnnnnnnnnnnnnnnnnnnnnnnnnnnnnnnnnnnnnnnnnnnnnnnnnnnnnnnnnnnnnnnnnnnnnnnnnnnnnnnnnnnnnnnnnnnnnnnnnnnnnnnnnnnnnnnnnnnnnnnnnnnnnnnnnnnnnnnnnnnnnnnnnnnnnnnnnnnnnnnnnnnnnnnnnnnnnnnnnnnnnnnnnnnnnnnnnnnnnnnnnnnnnnnnnnnnnnnnnnnnnnnnnnnnnnnnnnnnnnnnnnnnnnnnnnnnnnnnnnnnnnnnnnnnnnnnnnnnnnnnnnnnnnnnnnnnnnnnnnnnnnnnnnnnnnnnnnnnnnnnnnnnnnnnnnnnnnnnnnnnnnnnnnnnnnnnnnnnnnnnnnnnnnnnnnnnnnnnnnnnnnnnnnnnnnnnnnnnnnnnnnnnnnnnnnnnnnnnnnnnnnnnnnnnnnnnnnnnnnnnnnnnnnnnnnnnnnnnnnnnnnnnnnnnnnnnnnnnnnnnnnnnnnnnnnnnnnnnnnnnnnnnnnnnnnnnnnnnnnnnnnnnnnnnnnnnnnnnnnnnnnnnnnnnnnnnnnnnnnnnnnnnnnnnnnnnnnnnnnnnnnnnnnnnnnnnnnnnnnnnnnnnnnnnnnnnnnnnnnnnnnnnnnnnnnnnnnnnnnnnnnnnnnnnnnnnnnnnnnnnnnnnnnnnnnnnnnnnnnnnnnnnnnnnnnnnnnnnnnnnnnnnnnnnnnnnnnnnnnnnnnnnnnnnnnnnnnnnnnnnnnnnnnnnnnnnnnnnnnnnnnnnnnnnnnnnnnnnnnnnnnnnnnnnnnnnnnnnnnnnnnnnnnnnnnnnnnnnnnnnnnnnnnnnnnnnnnnnnnnnnnnnnnnnnnnnnnnnnnnnnnnnnnnnnnnnnnnnnnnnnnnnnnnnnnnnnnnnnnnnnnnnnnnnnnnnnnnnnnnnnnnnnnnnnnnnnnnnnnnnnnnnnnnnnnnnnnnnnnnnnnnnnnnnnnnnnnnnnnnnnnnnnnnnnnnnnnnnnnnnnnnnnnnnnnnnnnnnnnnnnnnnnnnnnnnnnnnnnnnnnnnnnnnnnnnnnnnnnnnnnnnnnnnnnnnnnnnnnnnnnnnnnnnnnnnnnnnnnnnnnnnnnnnnnnnnnnnnnnnnnnnnnnnnnnnnnnnnnnnnnnnnnnnnnnnnnnnnnnnnnnnnnnnnnnnnnnnnnnnnnnnnnnnnnnnnnnnnnnnnnnnnnnnnnnnnnnnnnnnnnnnnnnnnnnnnnnnnnnnnnnnnnnnnnnnnnnnnnnnnnnnnnnnnnnnnnnnnnnnnnnnnnnnnnnnnnnnnnnnnnnnnnnnnnnnnnnnnnnnnnnnnnnnnnnnnnnnnnnnnnnnnnnnnnnnnnnnnnnnnnnnnnnnnnnnnnnnnnnnnnnnnnnnnnnnnnnnnnnnnnnnnnnnnnnnnnnnnnnnnnnnnnnnnnnnnnnnnnnnnnnnnnnnnnnnnnnnnnnnnnnnnnnnnnnnnnnnnnnnnnnnnnnnnnnnnnnnnnnnnnnnnnnnnnnnnnnnnnnnnnnnnnnnnnnnnnnnnnnnnnnnnnnnnnnnnnnnnnnnnnnnnnnnnnnnnnnnnnnnnnnnnnnnnnnnnnnnnnnnnnnnnnnnnnnnnnnnnnnnnnnnnnnnnnnnnnnnnnnnnnnnnnnnnnnnnnnnnnnnnnnnnnnnnnnnnnnnnnnnnnnnnnnnnnnnnnnnnnnnnnnnnnnnnnnnnnnnnnnnnnnnnnnnnnnnnnnnnnnnnnnnnnnnnnnnnnnnnnnnnnnnnnnnnnnnnnnnnnnnnnnnnnnnnnnnnnnnnnnnnnnnnnnnnnnnnnnnnnnnnnnnnnnnnnnnnnnnnnnnnnnnnnnnnnnnnnnnnnnnnnnnnnnnnnnnnnnnnnnnnnnnnnnnnnnnnnnnnnnnnnnnnnnnnnnnnnnnnnnnnnnnnnnnnnnnnnnnnnnnnnnnnnnnnnnnnnnnnnnnnnnnnnnnnnnnnnnnnnnnnnnnnnnnnnnnnnnnnnnnnnnnnnnnnnnnnnnnnnnnnnnnnnnnnnnnnnnnnnnnnnnnnnnnnnnnnnnnnnnnnnnnnnnnnnnnnnnnnnnnnnnnnnnnnnnnnnnnnnnnnnnnnnnnnnnnnnnnnnnnnnnnnnnnnnnnnnnnnnnnnnnnnnnnnnnnnnnnnnnnnnnnnnnnnnnnnnnnnnnnnnnnnnnnnnnnnnnnnnnnnnnnnnnnnnnnnnnnnnnnnnnnnnnnnnnnnnnnnnnnnnnnnnnnnnnnnnnnnnnnnnnnnnnnnnnnnnnnnnnnnnnnnnnnnnnnnnnnnnnnnnnnnnnnnnnnnnnnnnnnnnnnnnnnnnnnnnnnnnnnnnnnnnnnnnnnnnnnnnnnnnnnnnnnnnnnnnnnnnnnnnnnnnnnnnnnnnnnnnnnnnnnnnnnnnnnnnnnnnnnnnnnnnnnnnnnnnnnnnnnnnnnnnnnnnnnnnnnnnnnnnnnnnnnnnnnnnnnnnnnnnnnnnnnnnnnnnnnnnnnnnnnnnnnnnnnnnnnnnnnnnnnnnnnnnnnnnnnnnnnnnnnnnnnnnnnnnnnnnnnnnnnnnnnnnnnnnnnnnnnnnnnnnnnnnnnnnnnnnnnnnnnnnnnnnnnnnnnnnnnnnnnnnnnnnnnnnnnnnnnnnnnnnnnnnnnnnnnnnnnnnnnnnnnnnnnnnnnnnnnnnnnnnnnnnnnnnnnnnnnnnnnnnnnnnnnnnnnnnnnnnnnnnnnnnnnnnnnnnnnnnnnnnnnnnnnnnnnnnnnnnnnnnnnnnnnnnnnnnnnnnnnnnnnnnnnnnnnnnnnnnnnnnnnnnnnnnnnnnnnnnnnnnnnnnnnnnnnnnnnnnnnnnnnnnnnnnnnnnnnnnnnnnnnnnnnnnnnnnnnnnnnnnnnnnnnnnnnnnnnnnnnnnnnnnnnnnnnnnnnnnnnnnnnnnnnnnnnnnnnnnnnnnnnnnnnnnnnnnnnnnnnnnnnnnnnnnnnnnnnnnnnnnnnnnnnnnnnnnnnnnnnnnnnnnnnnnnnnnnnnnnnnnnnnnnnnnnnnnnnnnnnnnnnnnnnnnnnnnnnnnnnnnnnnnnnnnnnnnnnnnnnnnnnnnnnnnnnnnnnnnnnnnnnnnnnnnnnnnnnnnnnnnnnnnnnnnnnnnnnnnnnnnnnnnnnnnnnnnnnnnnnnnnnnnnnnnnnnnnnnnnnnnnnnnnnnnnnnnnnnnnnnnnnnnnnnnnnnnnnnnnnnnnnnnnnnnnnnnnnnnnnnnnnnnnnnnnnnnnnnnnnnnnnnnnnnnnnnnnnnnnnnnnnnnnnnnnnnnnnnnnnnnnnnnnnnnnnnnnnnnnnnnnnnnnnnnnnnnnnnnnnnnnnnnnnnnnnnnnnnnnnnnnnnnnnnnnnnnnnnnnnnnnnnnnnnnnnnnnnnnnnnnnnnnnnnnnnnnnnnnnnnnnnnnnnnnnnnnnnnnnnnnnnnnnnnnnnnnnnnnnnnnnnnnnnnnnnnnnnnnnnnnnnnnnnnnnnnnnnnnnnnnnnnnnnnnnnnnnnnnnnnnnnnnnnnnnnnnnnnnnnnnnnnnnnnnnnnnnnnnnnnnnnnnnnnnnnnnnnnnnnnnnnnnnnnnnnnnnnnnnnnnnnnnnnnnnnnnnnnnnnnnnnnnnnnnnnnnnnnnnnnnnnnnnnnnnnnnnnnnnnnnnnnnnnnnnnnnnnnnnnnnnnnnnnnnnnnnnnnnnnnnnnnnnnnnnnnnnnnnnnnnnnnnnnnnnnnnnnnnnnnnnnnnnnnnnnnnnnnnnnnnnnnnnnnnnnnnnnnnnnnnnnnnnnnnnnnnnnnnnnnnnnnnnnnnnnnnnnnnnnnnnnnnnnnnnnnnnnnnnnnnnnnnnnnnnnnnnnnnnnnnnnnnnnnnnnnnnnnnnnnnnnnnnnnnnnnnnnnnnnnnnnnnnnnnnnnnnnnnnnnnnnnnnnnnnnnnnnnnnnnnnnnnnnnnnnnnnnnnnnnnnnnnnnnnnnnnnnnnnnnnnnnnnnnnnnnnnnnnnnnnnnnnnnnnnnnnnnnnnnnnnnnnnnnnnnnnnnnnnnnnnnnnnnnnnnnnnnnnnnnnnnnnnnnnnnnnnnnnnnnnnnnnnnnnnnnnnnnnnnnnnnnnnnnnnnnnnnnnnnnnnnnnnnnnnnnnnnnnnnnnnnnnnnnnnnnnnnnnnnnnnnnnnnnnnnnnnnnnnnnnnnnnnnnnnnnnnnnnnnnnnnnnnnnnnnnnnnnnnnnnnnnnnnnnnnnnnnnnnnnnnnnnnnnnnnnnnnnnnnnnnnnnnnnnnnnnnnnnnnnnnnnnnnnnnnnnnnnnnnnnnnnnnnnnnnnnnnnnnnnnnnnnnnnnnnnnnnnnnnnnnnnnnnnnnnnnnnnnnnnnnnnnnnnnnnnnnnnnnnnnnnnnnnnnnnnnnnnnnnnnnnnnnnnnnnnnnnnnnnnnnnnnnnnnnnnnnnnnnnnnnnnnnnnnnnnnnnnnnnnnnnnnnnnnnnnnnnnnnnnnnnnnnnnnnnnnnnnnnnnnnnnnnnnnnnnnnnnnnnnnnnnnnnnnnnnnnnnnnnnnnnnnnnnnnnnnnnnnnnnnnnnnnnnnnnnnnnnnnnnnnnnnnnnnnnnnnnnnnnnnnnnnnnnnnnnnnnnnnnnnnnnnnnnnnnnnnnnnnnnnnnnnnnnnnnnnnnnnnnnnnnnnnnnnnnnnnnnnnnnnnnnnnnnnnnnnnnnnnnnnnnnnnnnnnnnnnnnnnnnnnnnnnnnnnnnnnnnnnnnnnnnnnnnnnnnnnnnnnnnnnnnnnnnnnnnnnnnnnnnnnnnnnnnnnnnnnnnnnnnnnnnnnnnnnnnnnnnnnnnnnnnnnnnnnnnnnnnnnnnnnnnnnnnnnnnnnnnnnnnnnnnnnnnnnnnnnnnnnnnnnnnnnnnnnnnnnnnnnnnnnnnnnnnnnnnnnnnnnnnnnnnnnnnnnnnnnnnnnnnnnnnnnnnnnnnnnnnnnnnnnnnnnnnnnnnnnnnnnnnnnnnnnnnnnnnnnnnnnnnnnnnnnnnnnnnnnnnnnnnnnnnnnnnnnnnnnnnnnnnnnnnnnnnnnnnnnnnnnnnnnnnnnnnnnnnnnnnnnnnnnnnnnnnnnnnnnnnnnnnnnnnnnnnnnnnnnnnnnnnnnnnnnnnnnnnnnnnnnnnnnnnnnnnnnnnnnnnnnnnnnnnnnnnnnnnnnnnnnnnnnnnnnnnnnnnnnnnnnnnnnnnnnnnnnnnnnnnnnnnnnnnnnnnnnnnnnnnnnnnnnnnnnnnnnnnnnnnnnnnnnnnnnnnnnnnnnnnnnnnnnnnnnnnnnnnnnnnnnnnnnnnnnnnnnnnnnnnnnnnnnnnnnnnnnnnnnnnnnnnnnnnnnnnnnnnnnnnnnnnnnnnnnnnnnnnnnnnnnnnnnnnnnnnnnnnnnnnnnnnnnnnnnnnnnnnnnnnnnnnnnnnnnnnnnnnnnnnnnnnnnnnnnnnnnnnnnnnnnnnnnnnnnnnnnnnnnnnnnnnnnnnnnnnnnnnnnnnnnnnnnnnnnnnnnnnnnnnnnnnnnnnnnnnnnnnnnnnnnnnnnnnnnnnnnnnnnnnnnnnnnnnnnnnnnnnnnnnnnnnnnnnnnnnnnnnnnnnnnnnnnnnnnnnnnnnnnnnnnnnnnnnnnnnnnnnnnnnnnnnnnnnnnnnnnnnnnnnnnnnnnnnnnnnnnnnnnnnnnnnnnnnnnnnnnnnnnnnnnnnnnnnnnnnnnnnnnnnnnnnnnnnnnnnnnnnnnnnnnnnnnnnnnnnnnnnnnnnnnnnnnnnnnnnnnnnnnnnnnnnnnnnnnnnnnnnnnnnnnnnnnnnnnnnnnnnnnnnnnnnnnnnnnnnnnnnnnnnnnnnnnnnnnnnnnnnnnnnnnnnnnnnnnnnnnnnnnnnnnnnnnnnnnnnnnnnnnnnnnnnnnnnnnnnnnnnnnnnnnnnnnnnnnnnnnnnnnnnnnnnnnnnnnnnnnnnnnnnnnnnnnnnnnnnnnnnnnnnnnnnnnnnnnnnnnnnnnnnnnnnnnnnnnnnnnnnnnnnnnnnnnnnnnnnnnnnnnnnnnnnnnnnnnnnnnnnnnnnnnnnnnnnnnnnnnnnnnnnnnnnnnnnnnnnnnnnnnnnnnnnnnnnnnnnnnnnnnnnnnnnnnnnnnnnnnnnnnnnnnnnnnnnnnnnnnnnnnnnnnnnnnnnnnnnnnnnnnnnnnnnnnnnnnnnnnnnnnnnnnnnnnnnnnnnnnnnnnnnnnnnnnnnnnnnnnnnnnnnnnnnnnnnnnnnnnnnnnnnnnnnnnnnnnnnnnnnnnnnnnnnnnnnnnnnnnnnnnnnnnnnnnnnnnnnnnnnnnnnnnnnnnnnnnnnnnnnnnnnnnnnnnnnnnnnnnnnnnnnnnnnnnnnnnnnnnnnnnnnnnnnnnnnnnnnnnnnnnnnnnnnnnnnnnnnnnnnnnnnnnnnnnnnnnnnnnnnnnnnnnnnnnnnnnnnnnnnnnnnnnnnnnnnnnnnnnnnnnnnnnnnnnnnnnnnnnnnnnnnnnnnnnnnnnnnnnnnnnnnnnnnnnnnnnnnnnnnnnnnnnnnnnnnnnnnnnnnnnnnnnnnnnnnnnnnnnnnnnnnnnnnnnnnnnnnnnnnnnnnnnnnnnnnnnnnnnnnnnnnnnnnnnnnnnnnnnnnnnnnnnnnnnnnnnnnnnnnnnnnnnnnnnnnnnnnnnnnnnnnnnnnnnnnnnnnnnnnnnnnnnnnnnnnnnnnnnnnnnnnnnnnnnnnnnnnnnnnnnnnnnnnnnnnnnnnnnnnnnnnnnnnnnnnnnnnnnnnnnnnnnnnnnnnnnnnnnnnnnnnnnnnnnnnnnnnnnnnnnnnnnnnnnnnnnnnnnnnnnnnnnnnnnnnnnnnnnnnnnnnnnnnnnnnnnnnnnnnnnnnnnnnnnnnnnnnnnnnnnnnnnnnnnnnnnnnnnnnnnnnnnnnnnnnnnnnnnnnnnnnnnnnnnnnnnnnnnnnnnnnnnnnnnnnnnnnnnnnnnnnnnnnnnnnnnnnnnnnnnnnnnnnnnnnnnnnnnnnnnnnnnnnnnnnnnnnnnnnnnnnnnnnnnnnnnnnnnnnnnnnnnnnnnnnnnnnnnnnnnnnnnnnnnnnnnnnnnnnnnnnnnnnnnnnnnnnnnnnnnnnnnnnnnnnnnnnnnnnnnnnnnnnnnnnnnnnnnnnnnnnnnnnnnnnnnnnnnnnnnnnnnnnnnnnnnnnnnnnnnnnnnnnnnnnnnnnnnnnnnnnnnnnnnnnnnnnnnnnnnnnnnnnnnnnnnnnnnnnnnnnnnnnnnnnnnnnnnnnnnnnnnnnnnnnnnnnnnnnnnnnnnnnnnnnnnnnnnnnnnnnnnnnnnnnnnnnnnnnnnnnnnnnnnnnnnnnnnnnnnnnnnnnnnnnnnnnnnnnnnnnnnnnnnnnnnnnnnnnnnnnnnnnnnnnnnnnnnnnnnnnnnnnnnnnnnnnnnnnnnnnnnnnnnnnnnnnnnnnnnnnnnnnnnnnnnnnnnnnnnnnnnnnnnnnnnnnnnnnnnnnnnnnnnnnnnnnnnnnnnnnnnnnnnnnnnnnnnnnnnnnnnnnnnnnnnnnnnnnnnnnnnnnnnnnnnnnnnnnnnnnnnnnnnnnnnnnnnnnnnnnnnnnnnnnnnnnnnnnnnnnnnnnnnnnnnnnnnnnnnnnnnnnnnnnnnnnnnnnnnnnnnnnnnnnnnnnnnnnnnnnnnnnnnnnnnnnnnnnnnnnnnnnnnnnnnnnnnnnnnnnnnnnnnnnnnnnnnnnnnnnnnnnnnnnnnnnnnnnnnnnnnnnnnnnnnnnnnnnnnnnnnnnnnnnnnnnnnnnnnnnnnnnnnnnnnnnnnnnnnnnnnnnnnnnnnnnnnnnnnnnnnnnnnnnnnnnnnnnnnnnnnnnnnnnnnnnnnnnnnnnnnnnnnnnnnnnnnnnnnnnnnnnnnnnnnnnnnnnnnnnnnnnnnnnnnnnnnnnnnnnnnnnnnnnnnnnnnnnnnnnnnnnnnnnnnnnnnnnnnnnnnnnnnnnnnnnnnnnnnnnnnnnnnnnnnnnnnnnnnnnnnnnnnnnnnnnnnnnnnnnnnnnnnnnnnnnnnnnnnnnnnnnnnnnnnnnnnnnnnnnnnnnnnnnnnnnnnnnnnnnnnnnnnnnnnnnnnnnnnnnnnnnnnnnnnnnnnnnnnnnnnnnnnnnnnnnnnnnnnnnnnnnnnnnnnnnnnnnnnnnnnnnnnnnnnnnnnnnnnnnnnnnnnnnnnnnnnnnnnnnnnnnnnnnnnnnnnnnnnnnnnnnnnnnnnnnnnnnnnnnnnnnnnnnnnnnnnnnnnnnnnnnnnnnnnnnnnnnnnnnnnnnnnnnnnnnnnnnnnnnnnnnnnnnnnnnnnnnnnnnnnnnnnnnnnnnnnnnnnnnnnnnnnnnnnnnnnnnnnnnnnnnnnnnnnnnnnnnnnnnnnnnnnnnnnnnnnnnnnnnnnnnnnnnnnnnnnnnnnnnnnnnnnnnnnnnnnnnnnnnnnnnnnnnnnnnnnnnnnnnnnnnnnnnnnnnnnnnnnnnnnnnnnnnnnnnnnnnnnnnnnnnnnnnnnnnnnnnnnnnnnnnnnnnnnnnnnnnnnnnnnnnnnnnnnnnnnnnnnnnnnnnnnnnnnnnnnnnnnnnnnnnnnnnnnnnnnnnnnnnnnnnnnnnnnnnnnnnnnnnnnnnnnnnnnnnnnnnnnnnnnnnnnnnnnnnnnnnnnnnnnnnnnnnnnnnnnnnnnnnnnnnnnnnnnnnnnnnnnnnnnnnnnnnnnnnnnnnnnnnnnnnnnnnnnnnnnnnnnnnnnnnnnnnnnnnnnnnnnnnnnnnnnnnnnnnnnnnnnnnnnnnnnnnnnnnnnnnnnnnnnnnnnnnnnnnnnnnnnnnnnnnnnnnnnnnnnnnnnnnnnnnnnnnnnnnnnnnnnnnnnnnnnnnnnnnnnnnnnnnnnnnnnnnnnnnnnnnnnnnnnnnnnnnnnnnnnnnnnnnnnnnnnnnnnnnnnnnnnnnnnnnnnnnnnnnnnnnnnnnnnnnnnnnnnnnnnnnnnnnnnnnnnnnnnnnnnnnnnnnnnnnnnnnnnnnnnnnnnnnnnnnnnnnnnnnnnnnnnnnnnnnnnnnnnnnnnnnnnnnnnnnnnnnnnnnnnnnnnnnnnnnnnnnnnnnnnnnnnnnnnnnnnnnnnnnnnnnnnnnnnnnnnnnnnnnnnnnnnnnnnnnnnnnnnnnnnnnnnnnnnnnnnnnnnnnnnnnnnnnnnnnnnnnnnnnnnnnnnnnnnnnnnnnnnnnnnnnnnnnnnnnnnnnnnnnnnnnnnnnnnnnnnnnnnnnnnnnnnnnnnnnnnnnnnnnnnnnnnnnnnnnnnnnnnnnnnnnnnnnnnnnnnnnnnnnnnnnnnnnnnnnnnnnnnnnnnnnnnnnnnnnnnnnnnnnnnnnnnnnnnnnnnnnnnnnnnnnnnnnnnnnnnnnnnnnnnnnnnnnnnnnnnnnnnnnnnnnnnnnnnnnnnnnnnnnnnnnnnnnnnnnnnnnnnnnnnnnnnnnnnnnnnnnnnnnnnnnnnnnnnnnnnnnnnnnnnnnnnnnnnnnnnnnnnnnnnnnnnnnnnnnnnnnnnnnnnnnnnnnnnnnnnnnnnnnnnnnnnnnnnnnnnnnnnnnnnnnnnnnnnnnnnnnnnnnnnnnnnnnnnnnnnnnnnnnnnnnnnnnnnnnnnnnnnnnnnnnnnnnnnnnnnnnnnnnnnnnnnnnnnnnnnnnnnnnnnnnnnnnnnnnnnnnnnnnnnnnnnnnnnnnnnnnnnnnnnnnnnnnnnnnnnnnnnnnnnnnnnnnnnnnnnnnnnnnnnnnnnnnnnnnnnnnnnnnnnnnnnnnnnnnnnnnnnnnnnnnnnnnnnnnnnnnnnnnnnnnnnnnnnnnnnnnnnnnnnnnnnnnnnnnnnnnnnnnnnnnnnnnnnnnnnnnnnnnnnnnnnnnnnnnnnnnnnnnnnnnnnnnnnnnnnnnnnnnnnnnnnnnnnnnnnnnnnnnnnnnnnnnnnnnnnnnnnnnnnnnnnnnnnnnnnnnnnnnnnnnnnnnnnnnnnnnnnnnnnnnnnnnnnnnnnnnnnnnnnnnnnnnnnnnnnnnnnnnnnnnnnnnnnnnnnnnnnnnnnnnnnnnnnnnnnnnnnnnnnnnnnnnnnnnnnnnnnnnnnnnnnnnnnnnnnnnnnnnnnnnnnnnnnnnnnnnnnnnnnnnnnnnnnnnnnnnnnnnnnnnnnnnnnnnnnnnnnnnnnnnnnnnnnnnnnnnnnnnnnnnnnnnnnnnnnnnnnnnnnnnnnnnnnnnnnnnnnnnnnnnnnnnnnnnnnnnnnnnnnnnnnnnnnnnnnnnnnnnnnnnnnnnnnnnnnnnnnnnnnnnnnnnnnnnnnnnnnnnnnnnnnnnnnnnnnnnnnnnnnnnnnnnnnnnnnnnnnnnnnnnnnnnnnnnnnnnnnnnnnnnnnnnnnnnnnnnnnnnnnnnnnnnnnnnnnnnnnnnnnnnnnnnnnnnnnnnnnnnnnnnnnnnnnnnnnnnnnnnnnnnnnnnnnnnnnnnnnnnnnnnnnnnnnnnnnnnnnnnnnnnnnnnnnnnnnnnnnnnnnnnnnnnnnnnnnnnnnnnnnnnnnnnnnnnnnnnnnnnnnnnnnnnnnnnnnnnnnnnnnnnnnnnnnnnnnnnnnnnnnnnnnnnnnnnnnnnnnnnnnnnnnnnnnnnnnnnnnnnnnnnnnnnnnnnnnnnnnnnnnnnnnnnnnnnnnnnnnnnnnnnnnnnnnnnnnnnnnnnnnnnnnnnnnnnnnnnnnnnnnnnnnnnnnnnnnnnnnnnnnnnnnnnnnnnnnnnnnnnnnnnnnnnnnnnnnnnnnnnnnnnnnnnnnnnnnnnnnnnnnnnnnnnnnnnnnnnnnnnnnnnnnnnnnnnnnnnnnnnnnnnnnnnnnnnnnnnnnnnnnnnnnnnnnnnnnnnnnnnnnnnnnnnnnnnnnnnnnnnnnnnnnnnnnnnnnnnnnnnnnnnnnnnnnnnnnnnnnnnnnnnnnnnnnnnnnnnnnnnnnnnnnnnnnnnnnnnnnnnnnnnnnnnnnnnnnnnnnnnnnnnnnnnnnnnnnnnnnnnnnnnnnnnnnnnnnnnnnnnnnnnnnnnnnnnnnnnnnnnnnnnnnnnnnnnnnnnnnnnnnnnnnnnnnnnnnnnnnnnnnnnnnnnnnnnnnnnnnnnnnnnnnnnnnnnnnnnnnnnnnnnnnnnnnnnnnnnnnnnnnnnnnnnnnnnnnnnnnnnnnnnnnnnnnnnnnnnnnnnnnnnnnnnnnnnnnnnnnnnnnnnnnnnnnnnnnnnnnnnnnnnnnnnnnnnnnnnnnnnnnnnnnnnnnnnnnnnnnnnnnnnnnnnnnnnnnnnnnnnnnnnnnnnnnnnnnnnnnnnnnnnnnnnnnnnnnnnnnnnnnnnnnnnnnnnnnnnnnnnnnnnnnnnnnnnnnnnnnnnnnnnnnnnnnnnnnnnnnnnnnnnnnnnnnnnnnnnnnnnnnnnnnnnnnnnnnnnnnnnnnnnnnnnnnnnnnnnnnnnnnnnnnnnnnnnnnnnnnnnnnnnnnnnnnnnnnnnnnnnnnnnnnnnnnnnnnnnnnnnnnnnnnnnnnnnnnnnnnnnnnnnnnnnnnnnnnnnnnnnnnnnnnnnnnnnnnnnnnnnnnnnnnnnnnnnnnnnnnnnnnnnnnnnnnnnnnnnnnnnnnnnnnnnnnnnnnnnnnnnnnnnnnnnnnnnnnnnnnnnnnnnnnnnnnnnnnnnnnnnnnnnnnnnnnnnnnnnnnnnnnnnnnnnnnnnnnnnnnnnnnnnnnnnnnnnnnnnnnnnnnnnnnnnnnnnnnnnnnnnnnnnnnnnnnnnnnnnnnnnnnnnnnnnnnnnnnnnnnnnnnnnnnnnnnnnnnnnnnnnnnnnnnnnnnnnnnnnnnnnnnnnnnnnnnnnnnnnnnnnnnnnnnnnnnnnnnnnnnnnnnnnnnnnnnnnnnnnnnnnnnnnnnnnnnnnnnnnnnnnnnnnnnnnnnnnnnnnnnnnnnnnnnnnnnnnnnnnnnnnnnnnnnnnnnnnnnnnnnnnnnnnnnnnnnnnnnnnnnnnnnnnnnnnnnnnnnnnnnnnnnnnnnnnnnnnnnnnnnnnnnnnnnnnnnnnnnnnnnnnnnnnnnnnnnnnnnnnnnnnnnnnnnnnnnnnnnnnnnnnnnnnnnnnnnnnnnnnnnnnnnnnnnnnnnnnnnnnnnnnnnnnnnnnnnnnnnnnnnnnnnnnnnnnnnnnnnnnnnnnnnnnnnnnnnnnnnnnnnnnnnnnnnnnnnnnnnnnnnnnnnnnnnnnnnnnnnnnnnnnnnnnnnnnnnnnnnnnnnnnnnnnnnnnnnnnnnnnnnnnnnnnnnnnnnnnnnnnnnnnnnnnnnnnnnnnnnnnnnnnnnnnnnnnnnnnnnnnnnnnnnnnnnnnnnnnnnnnnnnnnnnnnnnnnnnnnnnnnnnnnnnnnnnnnnnnnnnnnnnnnnnnnnnnnnnnnnnnnnnnnnnnnnnnnnnnnnnnnnnnnnnnnnnnnnnnnnnnnnnnnnnnnnnnnnnnnnnnnnnnnnnnnnnnnnnnnnnnnnnnnnnnnnnnnnnnnnnnnnnnnnnnnnnnnnnnnnnnnnnnnnnnnnnnnnnnnnnnnnnnnnnnnnnnnnnnnnnnnnnnnnnnnnnnnnnnnnnnnnnnnnnnnnnnnnnnnnnnnnnnnnnnnnnnnnnnnnnnnnnnnnnnnnnnnnnnnnnnnnnnnnnnnnnnnnnnnnnnnnnnnnnnnnnnnnnnnnnnnnnnnnnnnnnnnnnnnnnnnnnnnnnnnnnnnnnnnnnnnnnnnnnnnnnnnnnnnnnnnnnnnnnnnnnnnnnnnnnnnnnnnnnnnnnnnnnnnnnnnnnnnnnnnnnnnnnnnnnnnnnnnnnnnnnnnnnnnnnnnnnnnnnnnnnnnnnnnnnnnnnnnnnnnnnnnnnnnnnnnnnnnnnnnnnnnnnnnnnnnnnnnnnnnnnnnnnnnnnnnnnnnnnnnnnnnnnnnnnnnnnnnnnnnnnnnnnnnnnnnnnnnnnnnnnnnnnnnnnnnnnnnnnnnnnnnnnnnnnnnnnnnnnnnnnnnnnnnnnnnnnnnnnnnnnnnnnnnnnnnnnnnnnnnnnnnnnnnnnnnnnnnnnnnnnnnnnnnnnnnnnnnnnnnnnnnnnnnnnnnnnnnnnnnnnnnnnnnnnnnnnnnnnnnnnnnnnnnnnnnnnnnnnnnnnnnnnnnnnnnnnnnnnnnnnnnnnnnnnnnnnnnnnnnnnnnnnnnnnnnnnnnnnnnnnnnnnnnnnnnnnnnnnnnnnnnnnnnnnnnnnnnnnnnnnnnnnnnnnnnnnnnnnnnnnnnnnnnnnnnnnnnnnnnnnnnnnnnnnnnnnnnnnnnnnnnnnnnnnnnnnnnnnnnnnnnnnnnnnnnnnnnnnnnnnnnnnnnnnnnnnnnnnnnnnnnnnnnnnnnnnnnnnnnnnnnnnnnnnnnnnnnnnnnnnnnnnnnnnnnnnnnnnnnnnnnnnnnnnnnnnnnnnnnnnnnnnnnnnnnnnnnnnnnnnnnnnnnnnnnnnnnnnnnnnnnnnnnnnnnnnnnnnnnnnnnnnnnnnnnnnnnnnnnnnnnnnnnnnnnnnnnnnnnnnnnnnnnnnnnnnnnnnnnnnnnnnnnnnnnnnnnnnnnnnnnnnnnnnnnnnnnnnnnnnnnnnnnnnnnnnnnnnnnnnnnnnnnnnnnnnnnnnnnnnnnnnnnnnnnnnnnnnnnnnnnnnnnnnnnnnnnnnnnnnnnnnnnnnnnnnnnnnnnnnnnnnnnnnnnnnnnnnnnnnnnnnnnnnnnnnnnnnnnnnnnnnnnnnnnnnnnnnnnnnnnnnnnnnnnnnnnnnnnnnnnnnnnnnnnnnnnnnnnnnnnnnnnnnnnnnnnnnnnnnnnnnnnnnnnnnnnnnnnnnnnnnnnnnnnnnnnnnnnnnnnnnnnnnnnnnnnnnnnnnnnnnnnnnnnnnnnnnnnnnnnnnnnnnnnnnnnnnnnnnnnnnnnnnnnnnnnnnnnnnnnnnnnnnnnnnnnnnnnnnnnnnnnnnnnnnnnnnnnnnnnnnnnnnnnnnnnnnnnnnnnnnnnnnnnnnnnnnnnnnnnnnnnnnnnnnnnnnnnnnnnnnnnnnnnnnnnnnnnnnnnnnnnnnnnnnnnnnnnnnnnnnnnnnnnnnnnnnnnnnnnnnnnnnnnnnnnnnnnnnnnnnnnnnnnnnnnnnnnnnnnnnnnnnnnnnnnnnnnnnnnnnnnnnnnnnnnnnnnnnnnnnnnnnnnnnnnnnnnnnnnnnnnnnnnnnnnnnnnnnnnnnnnnnnnnnnnnnnnnnnnnnnnnnnnnnnnnnnnnnnnnnnnnnnnnnnnnnnnnnnnnnnnnnnnnnnnnnnnnnnnnnnnnnnnnnnnnnnnnnnnnnnnnnnnnnnnnnnnnnnnnnnnnnnnnnnnnnnnnnnnnnnnnnnnnnnnnnnnnnnnnnnnnnnnnnnnnnnnnnnnnnnnnnnnnnnnnnnnnnnnnnnnnnnnnnnnnnnnnnnnnnnnnnnnnnnnnnnnnnnnnnnnnnnnnnnnnnnnnnnnnnnnnnnnnnnnnnnnnnnnnnnnnnnnnnnnnnnnnnnnnnnnnnnnnnnnnnnnnnnnnnnnnnnnnnnnnnnnnnnnnnnnnnnnnnnnnnnnnnnnnnnnnnnnnnnnnnnnnnnnnnnnnnnnnnnnnnnnnnnnnnnnnnnnnnnnnnnnnnnnnnnnnnnnnnnnnnnnnnnnnnnnnnnnnnnnnnnnnnnnnnnnnnnnnnnnnnnnnnnnnnnnnnnnnnnnnnnnnnnnnnnnnnnnnnnnnnnnnnnnnnnnnnnnnnnnnnnnnnnnnnnnnnnnnnnnnnnnnnnnnnnnnnnnnnnnnnnnnnnnnnnnnnnnnnnnnnnnnnnnnnnnnnnnnnnnnnnnnnnnnnnnnnnnnnnnnnnnnnnnnnnnnnnnnnnnnnnnnnnnnnnnnnnnnnnnnnnnnnnnnnnnnnnnnnnnnnnnnnnnnnnnnnnnnnnnnnnnnnnnnnnnnnnnnnnnnnnnnnnnnnnnnnnnnnnnnnnnnnnnnnnnnnnnnnnnnnnnnnnnnnnnnnnnnnnnnnnnnnnnnnnnnnnnnnnnnnnnnnnnnnnnnnnnnnnnnnnnnnnnnnnnnnnnnnnnnnnnnnnnnnnnnnnnnnnnnnnnnnnnnnnnnnnnnnnnnnnnnnnnnnnnnnnnnnnnnnnnnnnnnnnnnnnnnnnnnnnnnnnnnnnnnnnnnnnnnnnnnnnnnnnnnnnnnnnnnnnnnnnnnnnnnnnnnnnnnnnnnnnnnnnnnnnnnnnnnnnnnnnnnnnnnnnnnnnnnnnnnnnnnnnnnnnnnnnnnnnnnnnnnnnnnnnnnnnnnnnnnnnnnnnnnnnnnnnnnnnnnnnnnnnnnnnnnnnnnnnnnnnnnnnnnnnnnnnnnnnnnnnnnnnnnnnnnnnnnnnnnnnnnnnnnnnnnnnnnnnnnnnnnnnnnnnnnnnnnnnnnnnnnnnnnnnnnnnnnnnnnnnnnnnnnnnnnnnnnnnnnnnnnnnnnnnnnnnnnnnnnnnnnnnnnnnnnnnnnnnnnnnnnnnnnnnnnnnnnnnnnnnnnnnnnnnnnnnnnnnnnnnnnnnnnnnnnnnnnnnnnnnnnnnnnnnnnnnnnnnnnnnnnnnnnnnnnnnnnnnnnnnnnnnnnnnnnnnnnnnnnnnnnnnnnnnnnnnnnnnnnnnnnnnnnnnnnnnnnnnnnnnnnnnnnnnnnnnnnnnnnnnnnnnnnnnnnnnnnnnnnnnnnnnnnnnnnnnnnnnnnnnnnnnnnnnnnnnnnnnnnnnnnnnnnnnnnnnnnnnnnnnnnnnnnnnnnnnnnnnnnnnnnnnnnnnnnnnnnnnnnnnnnnnnnnnnnnnnnnnnnnnnnnnnnnnnnnnnnnnnnnnnnnnnnnnnnnnnnnnnnnnnnnnnnnnnnnnnnnnnnnnnnnnnnnnnnnnnnnnnnnnnnnnnnnnnnnnnnnnnnnnnnnnnnnnnnnnnnnnnnnnnnnnnnnnnnnnnnnnnnnnnnnnnnnnnnnnnnnnnnnnnnnnnnnnnnnnnnnnnnnnnnnnnnnnnnnnnnnnnnnnnnnnnnnnnnnnnnnnnnnnnnnnnnnnnnnnnnnnnnnnnnnnnnnnnnnnnnnnnnnnnnnnnnnnnnnnnnnnnnnnnnnnnnnnnnnnnnnnnnnnnnnnnnnnnnnnnnnnnnnnnnnnnnnnnnnnnnnnnnnnnnnnnnnnnnnnnnnnnnnnnnnnnnnnnnnnnnnnnnnnnnnnnnnnnnnnnnnnnnnnnnnnnnnnnnnnnnnnnnnnnnnnnnnnnnnnnnnnnnnnnnnnnnnnnnnnnnnnnnnnnnnnnnnnnnnnnnnnnnnnnnnnnnnnnnnnnnnnnnnnnnnnnnnnnnnnnnnnnnnnnnnnnnnnnnnnnnnnnnnnnnnnnnnnnnnnnnnnnnnnnnnnnnnnnnnnnnnnnnnnnnnnnnnnnnnnnnnnnnnnnnnnnnnnnnnnnnnnnnnnnnnnnnnnnnnnnnnnnnnnnnnnnnnnnnnnnnnnnnnnnnnnnnnnnnnnnnnnnnnnnnnnnnnnnnnnnnnnnnnnnnnnnnnnnnnnnnnnnnnnnnnnnnnnnnnnnnnnnnnnnnnnnnnnnnnnnnnnnnnnnnnnnnnnnnnnnnnnnnnnnnnnnnnnnnnnnnnnnnnnnnnnnnnnnnnnnnnnnnnnnnnnnnnnnnnnnnnnnnnnnnnnnnnnnnnnnnnnnnnnnnnnnnnnnnnnnnnnnnnnnnnnnnnnnnnnnnnnnnnnnnnnnnnnnnnnnnnnnnnnnnnnnnnnnnnnnnnnnnnnnnnnnnnnnnnnnnnnnnnnnnnnnnnnnnnnnnnnnnnnnnnnnnnnnnnnnnnnnnnnnnnnnnnnnnnnnnnnnnnnnnnnnnnnnnnnnnnnnnnnnnnnnnnnnnnnnnnnnnnnnnnnnnnnnnnnnnnnnnnnnnnnnnnnnnnnnnnnnnnnnnnnnnnnnnnnnnnnnnnnnnnnnnnnnnnnnnnnnnnnnnnnnnnnnnnnnnnnnnnnnnnnnnnnnnnnnnnnnnnnnnnnnnnnnnnnnnnnnnnnnnnnnnnnnnnnnnnnnnnnnnnnnnnnnnnnnnnnnnnnnnnnnnnnnnnnnnnnnnnnnnnnnnnnnnnnnnnnnnnnnnnnnnnnnnnnnnnnnnnnnnnnnnnnnnnnnnnnnnnnnnnnnnnnnnnnnnnnnnnnnnnnnnnnnnnnnnnnnnnnnnnnnnnnnnnnnnnnnnnnnnnnnnnnnnnnnnnnnnnnnnnnnnnnnnnnnnnnnnnnnnnnnnnnnnnnnnnnnnnnnnnnnnnnnnnnnnnnnnnnnnnnnnnnnnnnnnnnnnnnnnnnnnnnnnnnnnnnnnnnnnnnnnnnnnnnnnnnnnnnnnnnnnnnnnnnnnnnnnnnnnnnnnnnnnnnnnnnnnnnnnnnnnnnnnnnnnnnnnnnnnnnnnnnnnnnnnnnnnnnnnnnnnnnnnnnnnnnnnnnnnnnnnnnnnnnnnnnnnnnnnnnnnnnnnnnnnnnnnnnnnnnnnnnnnnnnnnnnnnnnnnnnnnnnnnnnnnnnnnnnnnnnnnnnnnnnnnnnnnnnnnnnnnnnnnnnnnnnnnnnnnnnnnnnnnnnnnnnnnnnnnnnnnnnnnnnnnnnnnnnnnnnnnnnnnnnnnnnnnnnnnnnnnnnnnnnnnnnnnnnnnnnnnnnnnnnnnnnnnnnnnnnnnnnnnnnnnnnnnnnnnnnnnnnnnnnnnnnnnnnnnnnnnnnnnnnnnnnnnnnnnnnnnnnnnnnnnnnnnnnnnnnnnnnnnnnnnnnnnnnnnnnnnnnnnnnnnnnnnnnnnnnnnnnnnnnnnnnnnnnnnnnnnnnnnnnnnnnnnnnnnnnnnnnnnnnnnnnnnnnnnnnnnnnnnnnnnnnnnnnnnnnnnnnnnnnnnnnnnnnnnnnnnnnnnnnnnnnnnnnnnnnnnnnnnnnnnnnnnnnnnnnnnnnnnnnnnnnnnnnnnnnnnnnnnnnnnnnnnnnnnnnnnnnnnnnnnnnnnnnnnnnnnnnnnnnnnnnnnnnnnnnnnnnnnnnnnnnnnnnnnnnnnnnnnnnnnnnnnnnnnnnnnnnnnnnnnnnnnnnnnnnnnnnnnnnnnnnnnnnnnnnnnnnnnnnnnnnnnnnnnnnnnnnnnnnnnnnnnnnnnnnnnnnnnnnnnnnnnnnnnnnnnnnnnnnnnnnnnnnnnnnnnnnnnnnnnnnnnnnnnnnnnnnnnnnnnnnnnnnnnnnnnnnnnnnnnnnnnnnnnnnnnnnnnnnnnnnnnnnnnnnnnnnnnnnnnnnnnnnnnnnnnnnnnnnnnnnnnnnnnnnnnnnnnnnnnnnnnnnnnnnnnnnnnnnnnnnnnnnnnnnnnnnnnnnnnnnnnnnnnnnnnnnnnnnnnnnnnnnnnnnnnnnnnnnnnnnnnnnnnnnnnnnnnnnnnnnnnnnnnnnnnnnnnnnnnnnnnnnnnnnnnnnnnnnnnnnnnnnnnnnnnnnnnnnnnnnnnnnnnnnnnnnnnnnnnnnnnnnnnnnnnnnnnnnnnnnnnnnnnnnnnnnnnnnnnnnnnnnnnnnnnnnnnnnnnnnnnnnnnnnnnnnnnnnnnnnnnnnnnnnnnnnnnnnnnnnnnnnnnnnnnnnnnnnnnnnnnnnnnnnnnnnnnnnnnnnnnnnnnnnnnnnnnnnnnnnnnnnnnnnnnnnnnnnnnnnnnnnnnnnnnnnnnnnnnnnnnnnnnnnnnnnnnnnnnnnnnnnnnnnnnnnnnnnnnnnnnnnnnnnnnnnnnnnnnnnnnnnnnnnnnnnnnnnnnnnnnnnnnnnnnnnnnnnnnnnnnnnnnnnnnnnnnnnnnnnnnnnnnnnnnnnnnnnnnnnnnnnnnnnnnnnnnnnnnnnnnnnnnnnnnnnnnnnnnnnnnnnnnnnnnnnnnnnnnnnnnnnnnnnnnnnnnnnnnnnnnnnnnnnnnnnnnnnnnnnnnnnnnnnnnnnnnnnnnnnnnnnnnnnnnnnnnnnnnnnnnnnnnnnnnnnnnnnnnnnnnnnnnnnnnnnnnnnnnnnnnnnnnnnnnnnnnnnnnnnnnnnnnnnnnnnnnnnnnnnnnnnnnnnnnnnnnnnnnnnnnnnnnnnnnnnnnnnnnnnnnnnnnnnnnnnnnnnnnnnnnnnnnnnnnnnnnnnnnnnnnnnnnnnnnnnnnnnnnnnnnnnnnnnnnnnnnnnnnnnnnnnnnnnnnnnnnnnnnnnnnnnnnnnnnnnnnnnnnnnnnnnnnnnnnnnnnnnnnnnnnnnnnnnnnnnnnnnnnnnnnnnnnnnnnnnnnnnnnnnnnnnnnnnnnnnnnnnnnnnnnnnnnnnnnnnnnnnnnnnnnnnnnnnnnnnnnnnnnnnnnnnnnnnnnnnnnnnnnnnnnnnnnnnnnnnnnnnnnnnnnnnnnnnnnnnnnnnnnnnnnnnnnnnnnnnnnnnnnnnnnnnnnnnnnnnnnnnnnnnnnnnnnnnnnnnnnnnnnnnnnnnnnnnnnnnnnnnnnnnnnnnnnnnnnnnnnnnnnnnnnnnnnnnnnnnnnnnnnnnnnnnnnnnnnnnnnnnnnnnnnnnnnnnnnnnnnnnnnnnnnnnnnnnnnnnnnnnnnnnnnnnnnnnnnnnnnnnnnnnnnnnnnnnnnnnnnnnnnnnnnnnnnnnnnnnnnnnnnnnnnnnnnnnnnnnnnnnnnnnnnnnnnnnnnnnnnnnnnnnnnnnnnnnnnnnnnnnnnnnnnnnnnnnnnnnnnnnnnnnnnnnnnnnnnnnnnnnnnnnnnnnnnnnnnnnnnnnnnnnnnnnnnnnnnnnnnnnnnnnnnnnnnnnnnnnnnnnnnnnnnnnnnnnnnnnnnnnnnnnnnnnnnnnnnnnnnnnnnnnnnnnnnnnnnnnnnnnnnnnnnnnnnnnnnnnnnnnnnnnnnnnnnnnnnnnnnnnnnnnnnnnnnnnnnnnnnnnnnnnnnnnnnnnnnnnnnnnnnnnnnnnnnnnnnnnnnnnnnnnnnnnnnnnnnnnnnnnnnnnnnnnnnnnnnnnnnnnnnnnnnnnnnnnnnnnnnnnnnnnnnnnnnnnnnnnnnnnnnnnnnnnnnnnnnnnnnnnnnnnnnnnnnnnnnnnnnnnnnnnnnnnnnnnnnnnnnnnnnnnnnnnnnnnnnnnnnnnnnnnnnnnnnnnnnnnnnnnnnnnnnnnnnnnnnnnnnnnnnnnnnnnnnnnnnnnnnnnnnnnnnnnnnnnnnnnnnnnnnnnnnnnnnnnnnnnnnnnnnnnnnnnnnnnnnnnnnnnnnnnnnnnnnnnnnnnnnnnnnnnnnnnnnnnnnnnnnnnnnnnnnnnnnnnnnnnnnnnnnnnnnnnnnnnnnnnnnnnnnnnnnnnnnnnnnnnnnnnnnnnnnnnnnnnnnnnnnnnnnnnnnnnnnnnnnnnnnnnnnnnnnnnnnnnnnnnnnnnnnnnnnnnnnnnnnnnnnnnnnnnnnnnnnnnnnnnnnnnnnnnnnnnnnnnnnnnnnnnnnnnnnnnnnnnnnnnnnnnnnnnnnnnnnnnnnnnnnnnnnnnnnnnnnnnnnnnnnnnnnnnnnnnnnnnnnnnnnnnnnnnnnnnnnnnnnnnnnnnnnnnnnnnnnnnnnnnnnnnnnnnnnnnnnnnnnnnnnnnnnnnnnnnnnnnnnnnnnnnnnnnnnnnnnnnnnnnnnnnnnnnnnnnnnnnnnnnnnnnnnnnnnnnnnnnnnnnnnnnnnnnnnnnnnnnnnnnnnnnnnnnnnnnnnnnnnnnnnnnnnnnnnnnnnnnnnnnnnnnnnnnnnnnnnnnnnnnnnnnnnnnnnnnnnnnnnnnnnnnnnnnnnnnnnnnnnnnnnnnnnnnnnnnnnnnnnnnnnnnnnnnnnnnnnnnnnnnnnnnnnnnnnnnnnnnnnnnnnnnnnnnnnnnnnnnnnnnnnnnnnnnnnnnnnnnnnnnnnnnnnnnnnnnnnnnnnnnnnnnnnnnnnnnnnnnnnnnnnnnnnnnnnnnnnnnnnnnnnnnnnnnnnnnnnnnnnnnnnnnnnnnnnnnnnnnnnnnnnnnnnnnnnnnnnnnnnnnnnnnnnnnnnnnnnnnnnnnnnnnnnnnnnnnnnnnnnnnnnnnnnnnnnnnnnnnnnnnnnnnnnnnnnnnnnnnnnnnnnnnnnnnnnnnnnnnnnnnnnnnnnnnnnnnnnnnnnnnnnnnnnnnnnnnnnnnnnnnnnnnnnnnnnnnnnnnnnnnnnnnnnnnnnnnnnnnnnnnnnnnnnnnnnnnnnnnnnnnnnnnnnnnnnnnnnnnnnnnnnnnnnnnnnnnnnnnnnnnnnnnnnnnnnnnnnnnnnnnnnnnnnnnnnnnnnnnnnnnnnnnnnnnnnnnnnnnnnnnnnnnnnnnnnnnnnnnnnnnnnnnnnnnnnnnnnnnnnnnnnnnnnnnnnnnnnnnnnnnnnnnnnnnnnnnnnnnnnnnnnnnnnnnnnnnnnnnnnnnnnnnnnnnnnnnnnnnnnnnnnnnnnnnnnnnnnnnnnnnnnnnnnnnnnnnnnnnnnnnnnnnnnnnnnnnnnnnnnnnnnnnnnnnnnnnnnnnnnnnnnnnnnnnnnnnnnnnnnnnnnnnnnnnnnnnnnnnnnnnnnnnnnnnnnnnnnnnnnnnnnnnnnnnnnnnnnnnnnnnnnnnnnnnnnnnnnnnnnnnnnnnnnnnnnnnnnnnnnnnnnnnnnnnnnnnnnnnnnnnnnnnnnnnnnnnnnnnnnnnnnnnnnnnnnnnnnnnnnnnnnnnnnnnnnnnnnnnnnnnnnnnnnnnnnnnnnnnnnnnnnnnnnnnnnnnnnnnnnnnnnnnnnnnnnnnnnnnnnnnnnnnnnnnnnnnnnnnnnnnnnnnnnnnnnnnnnnnnnnnnnnnnnnnnnnnnnnnnnnnnnnnnnnnnnnnnnnnnnnnnnnnnnnnnnnnnnnnnnnnnnnnnnnnnnnnnnnnnnnnnnnnnnnnnnnnnnnnnnnnnnnnnnnnnnnnnnnnnnnnnnnnnnnnnnnnnnnnnnnnnnnnnnnnnnnnnnnnnnnnnnnnnnnnnnnnnnnnnnnnnnnnnnnnnnnnnnnnnnnnnnnnnnnnnnnnnnnnnnnnnnnnnnnnnnnnnnnnnnnnnnnnnnnnnnnnnnnnnnnnnnnnnnnnnnnnnnnnnnnnnnnnnnnnnnnnnnnnnnnnnnnnnnnnnnnnnnnnnnnnnnnnnnnnnnnnnnnnnnnnnnnnnnnnnnnnnnnnnnnnnnnnnnnnnnnnnnnnnnnnnnnnnnnnnnnnnnnnnnnnnnnnnnnnnnnnnnnnnnnnnnnnnnnnnnnnnnnnnnnnnnnnnnnnnnnnnnnnnnnnnnnnnnnnnnnnnnnnnnnnnnnnnnnnnnnnnnnnnnnnnnnnnnnnnnnnnnnnnnnnnnnnnnnnnnnnnnnnnnnnnnnnnnnnnnnnnnnnnnnnnnnnnnnnnnnnnnnnnnnnnnnnnnnnnnnnnnnnnnnnnnnnnnnnnnnnnnnnnnnnnnnnnnnnnnnnnnnnnnnnnnnnnnnnnnnnnnnnnnnnnnnnnnnnnnnnnnnnnnnnnnnnnnnnnnnnnnnnnnnnnnnnnnnnnnnnnnnnnnnnnnnnnnnnnnnnnnnnnnnnnnnnnnnnnnnnnnnnnnnnnnnnnnnnnnnnnnnnnnnnnnnnnnnnnnnnnnnnnnnnnnnnnnnnnnnnnnnnnnnnnnnnnnnnnnnnnnnnnnnnnnnnnnnnnnnnnnnnnnnnnnnnnnnnnnnnnnnnnnnnnnnnnnnnnnnnnnnnnnnnnnnnnnnnnnnnnnnnnnnnnnnnnnnnnnnnnnnnnnnnnnnnnnnnnnnnnnnnnnnnnnnnnnnnnnnnnnnnnnnnnnnnnnnnnnnnnnnnnnnnnnnnnnnnnnnnnnnnnnnnnnnnnnnnnnnnnnnnnnnnnnnnnnnnnnnnnnnnnnnnnnnnnnnnnnnnnnnnnnnnnnnnnnnnnnnnnnnnnnnnnnnnnnnnnnnnnnnnnnnnnnnnnnnnnnnnnnnnnnnnnnnnnnnnnnnnnnnnnnnnnnnnnnnnnnnnnnnnnnnnnnnnnnnnnnnnnnnnnnnnnnnnnnnnnnnnnnnnnnnnnnnnnnnnnnnnnnnnnnnnnnnnnnnnnnnnnnnnnnnnnnnnnnnnnnnnnnnnnnnnnnnnnnnnnnnnnnnnnnnnnnnnnnnnnnnnnnnnnnnnnnnnnnnnnnnnnnnnnnnnnnnnnnnnnnnnnnnnnnnnnnnnnnnnnnnnnnnnnnnnnnnnnnnnnnnnnnnnnnnnnnnnnnnnnnnnnnnnnnnnnnnnnnnnnnnnnnnnnnnnnnnnnnnnnnnnnnnnnnnnnnnnnnnnnnnnnnnnnnnnnnnnnnnnnnnnnnnnnnnnnnnnnnnnnnnnnnnnnnnnnnnnnnnnnnnnnnnnnnnnnnnnnnnnnnnnnnnnnnnnnnnnnnnnnnnnnnnnnnnnnnnnnnnnnnnnnnnnnnnnnnnnnnnnnnnnnnnnnnnnnnnnnnnnnnnnnnnnnnnnnnnnnnnnnnnnnnnnnnnnnnnnnnnnnnnnnnnnnnnnnnnnnnnnnnnnnnnnnnnnnnnnnnnnnnnnnnnnnnnnnnnnnnnnnnnnnnnnnnnnnnnnnnnnnnnnnnnnnnnnnnnnnnnnnnnnnnnnnnnnnnnnnnnnnnnnnnnnnnnnnnnnnnnnnnnnnnnnnnnnnnnnnnnnnnnnnnnnnnnnnnnnnnnnnnnnnnnnnnnnnnnnnnnnnnnnnnnnnnnnnnnnnnnnnnnnnnnnnnnnnnnnnnnnnnnnnnnnnnnnnnnnnnnnnnnnnnnnnnnnnnnnnnnnnnnnnnnnnnnnnnnnnnnnnnnnnnnnnnnnnnnnnnnnnnnnnnnnnnnnnnnnnnnnnnnnnnnnnnnnnnnnnnnnnnnnnnnnnnnnnnnnnnnnnnnnnnnnnnnnnnnnnnnnnnnnnnnnnnnnnnnnnnnnnnnnnnnnnnnnnnnnnnnnnnnnnnnnnnnnnnnnnnnnnnnnnnnnnnnnnnnnnnnnnnnnnnnnnnnnnnnnnnnnnnnnnnnnnnnnnnnnnnnnnnnnnnnnnnnnnnnnnnnnnnnnnnnnnnnnnnnnnnnnnnnnnnnnnnnnnnnnnnnnnnnnnnnnnnnnnnnnnnnnnnnnnnnnnnnnnnnnnnnnnnnnnnnnnnnnnnnnnnnnnnnnnnnnnnnnnnnnnnnnnnnnnnnnnnnnnnnnnnnnnnnnnnnnnnnnnnnnnnnnnnnnnnnnnnnnnnnnnnnnnnnnnnnnnnnnnnnnnnnnnnnnnnnnnnnnnnnnnnnnnnnnnnnnnnnnnnnnnnnnnnnnnnnnnnnnnnnnnnnnnnnnnnnnnnnnnnnnnnnnnnnnnnnnnnnnnnnnnnnnnnnnnnnnnnnnnnnnnnnnnnnnnnnnnnnnnnnnnnnnnnnnnnnnnnnnnnnnnnnnnnnnnnnnnnnnnnnnnnnnnnnnnnnnnnnnnnnnnnnnnnnnnnnnnnnnnnnnnnnnnnnnnnnnnnnnnnnnnnnnnnnnnnnnnnnnnnnnnnnnnnnnnnnnnnnnnnnnnnnnnnnnnnnnnnnnnnnnnnnnnnnnnnnnnnnnnnnnnnnnnnnnnnnnnnnnnnnnnnnnnnnnnnnnnnnnnnnnnnnnnnnnnnnnnnnnnnnnnnnnnnnnnnnnnnnnnnnnnnnnnnnnnnnnnnnnnnnnnnnnnnnnnnnnnnnnnnnnnnnnnnnnnnnnnnnnnnnnnnnnnnnnnnnnnnnnnnnnnnnnnnnnnnnnnnnnnnnnnnnnnnnnnnnnnnnnnnnnnnnnnnnnnnnnnnnnnnnnnnnnnnnnnnnnnnnnnnnnnnnnnnnnnnnnnnnnnnnnnnnnnnnnnnnnnnnnnnnnnnnnnnnnnnnnnnnnnnnnnnnnnnnnnnnnnnnnnnnnnnnnnnnnnnnnnnnnnnnnnnnnnnnnnnnnnnnnnnnnnnnnnnnnnnnnnnnnnnnnnnnnnnnnnnnnnnnnnnnnnnnnnnnnnnnnnnnnnnnnnnnnnnnnnnnnnnnnnnnnnnnnnnnnnnnnnnnnnnnnnnnnnnnnnnnnnnnnnnnnnnnnnnnnnnnnnnnnnnnnnnnnnnnnnnnnnnnnnnnnnnnnnnnnnnnnnnnnnnnnnnnnnnnnnnnnnnnnnnnnnnnnnnnnnnnnnnnnnnnnnnnnnnnnnnnnnnnnnnnnnnnnnnnnnnnnnnnnnnnnnnnnnnnnnnnnnnnnnnnnnnnnnnnnnnnnnnnnnnnnnnnnnnnnnnnnnnnnnnnnnnnnnnnnnnnnnnnnnnnnnnnnnnnnnnnnnnnnnnnnnnnnnnnnnnnnnnnnnnnnnnnnnnnnnnnnnnnnnnnnnnnnnnnnnnnnnnnnnnnnnnnnnnnnnnnnnnnnnnnnnnnnnnnnnnnnnnnnnnnnnnnnnnnnnnnnnnnnnnnnnnnnnnnnnnnnnnnnnnnnnnnnnnnnnnnnnnnnnnnnnnnnnnnnnnnnnnnnnnnnnnnnnnnnnnnnnnnnnnnnnnnnnnnnnnnnnnnnnnnnnnnnnnnnnnnnnnnnnnnnnnnnnnnnnnnnnnnnnnnnnnnnnnnnnnnnnnnnnnnnnnnnnnnnnnnnnnnnnnnnnnnnnnnnnnnnnnnnnnnnnnnnnnnnnnnnnnnnnnnnnnnnnnnnnnnnnnnnnnnnnnnnnnnnnnnnnnnnnnnnnnnnnnnnnnnnnnnnnnnnnnnnnnnnnnnnnnnnnnnnnnnnnnnnnnnnnnnnnnnnnnnnnnnnnnnnnnnnnnnnnnnnnnnnnnnnnnnnnnnnnnnnnnnnnnnnnnnnnnnnnnnnnnnnnnnnnnnnnnnnnnnnnnnnnnnnnnnnnnnnnnnnnnnnnnnnnnnnnnnnnnnnnnnnnnnnnnnnnnnnnnnnnnnnnnnnnnnnnnnnnnnnnnnnnnnnnnnnnnnnnnnnnnnnnnnnnnnnnnnnnnnnnnnnnnnnnnnnnnnnnnnnnnnnnnnnnnnnnnnnnnnnnnnnnnnnnnnnnnnnnnnnnnnnnnnnnnnnnnnnnnnnnnnnnnnnnnnnnnnnnnnnnnnnnnnnnnnnnnnnnnnnnnnnnnnnnnnnnnnnnnnnnnnnnnnnnnnnnnnnnnnnnnnnnnnnnnnnnnnnnnnnnnnnnnnnnnnnnnnnnnnnnnnnnnnnnnnnnnnnnnnnnnnnnnnnnnnnnnnnnnnnnnnnnnnnnnnnnnnnnnnnnnnnnnnnnnnnnnnnnnnnnnnnnnnnnnnnnnnnnnnnnnnnnnnnnnnnnnnnnnnnnnnnnnnnnnnnnnnnnnnnnnnnnnnnnnnnnnnnnnnnnnnnnnnnnnnnnnnnnnnnnnnnnnnnnnnnnnnnnnnnnnnnnnnnnnnnnnnnnnnnnnnnnnnnnnnnnnnnnnnnnnnnnnnnnnnnnnnnnnnnnnnnnnnnnnnnnnnnnnnnnnnnnnnnnnnnnnnnnnnnnnnnnnnnnnnnnnnnnnnnnnnnnnnnnnnnnnnnnnnnnnnnnnnnnnnnnnnnnnnnnnnnnnnnnnnnnnnnnnnnnnnnnnnnnnnnnnnnnnnnnnnnnnnnnnnnnnnnnnnnnnnnnnnnnnnnnnnnnnnnnnnnnnnnnnnnnnnnnnnnnnnnnnnnnnnnnnnnnnnnnnnnnnnnnnnnnnnnnnnnnnnnnnnnnnnnnnnnnnnnnnnnnnnnnnnnnnnnnnnnnnnnnnnnnnnnnnnnnnnnnnnnnnnnnnnnnnnnnnnnnnnnnnnnnnnnnnnnnnnnnnnnnnnnnnnnnnnnnnnnnnnnnnnnnnnnnnnnnnnnnnnnnnnnnnnnnnnnnnnnnnnnnnnnnnnnnnnnnnnnnnnnnnnnnnnnnnnnnnnnnnnnnnnnnnnnnnnnnnnnnnnnnnnnnnnnnnnnnnnnnnnnnnnnnnnnnnnnnnnnnnnnnnnnnnnnnnnnnnnnnnnnnnnnnnnnnnnnnnnnnnnnnnnnnnnnnnnnnnnnnnnnnnnnnnnnnnnnnnnnnnnnnnnnnnnnnnnnnnnnnnnnnnnnnnnnnnnnnnnnnnnnnnnnnnnnnnnnnnnnnnnnnnnnnnnnnnnnnnnnnnnnnnnnnnnnnnnnnnnnnnnnnnnnnnnnnnnnnnnnnnnnnnnnnnnnnnnnnnnnnnnnnnnnnnnnnnnnnnnnnnnnnnnnnnnnnnnnnnnnnnnnnnnnnnnnnnnnnnnnnnnnnnnnnnnnnnnnnnnnnnnnnnnnnnnnnnnnnnnnnnnnnnnnnnnnnnnnnnnnnnnnnnnnnnnnnnnnnnnnnnnnnnnnnnnnnnnnnnnnnnnnnnnnnnnnnnnnnnnnnnnnnnnnnnnnnnnnnnnnnnnnnnnnnnnnnnnnnnnnnnnnnnnnnnnnnnnnnnnnnnnnnnnnnnnnnnnnnnnnnnnnnnnnnnnnnnnnnnnnnnnnnnnnnnnnnnnnnnnnnnnnnnnnnnnnnnnnnnnnnnnnnnnnnnnnnnnnnnnnnnnnnnnnnnnnnnnnnnnnnnnnnnnnnnnnnnnnnnnnnnnnnnnnnnnnnnnnnnnnnnnnnnnnnnnnnnnnnnnnnnnnnnnnnnnnnnnnnnnnnnnnnnnnnnnnnnnnnnnnnnnnnnnnnnnnnnnnnnnnnnnnnnnnnnnnnnnnnnnnnnnnnnnnnnnnnnnnnnnnnnnnnnnnnnnnnnnnnnnnnnnnnnnnnnnnnnnnnnnnnnnnnnnnnnnnnnnnnnnnnnnnnnnnnnnnnnnnnnnnnnnnnnnnnnnnnnnnnnnnnnnnnnnnnnnnnnnnnnnnnnnnnnnnnnnnnnnnnnnnnnnnnnnnnnnnnnnnnnnnnnnnnnnnnnnnnnnnnnnnnnnnnnnnnnnnnnnnnnnnnnnnnnnnnnnnnnnnnnnnnnnnnnnnnnnnnnnnnnnnnnnnnnnnnnnnnnnnnnnnnnnnnnnnnnnnnnnnnnnnnnnnnnnnnnnnnnnnnnnnnnnnnnnnnnnnnnnnnnnnnnnnnnnnnnnnnnnnnnnnnnnnnnnnnnnnnnnnnnnnnnnnnnnnnnnnnnnnnnnnnnnnnnnnnnnnnnnnnnnnnnnnnnnnnnnnnnnnnnnnnnnnnnnnnnnnnnnnnnnnnnnnnnnnnnnnnnnnnnnnnnnnnnnnnnnnnnnnnnnnnnnnnnnnnnnnnnnnnnnnnnnnnnnnnnnnnnnnnnnnnnnnnnnnnnnnnnnnnnnnnnnnnnnnnnnnnnnnnnnnnnnnnnnnnnnnnnnnnnnnnnnnnnnnnnnnnnnnnnnnnnnnnnnnnnnnnnnnnnnnnnnnnnnnnnnnnnnnnnnnnnnnnnnnnnnnnnnnnnnnnnnnnnnnnnnnnnnnnnnnnnnnnnnnnnnnnnnnnnnnnnnnnnnnnnnnnnnnnnnnnnnnnnnnnnnnnnnnnnnnnnnnnnnnnnnnnnnnnnnnnnnnnnnnnnnnnnnnnnnnnnnnnnnnnnnnnnnnnnnnnnnnnnnnnnnnnnnnnnnnnnnnnnnnnnnnnnnnnnnnnnnnnnnnnnnnnnnnnnnnnnnnnnnnnnnnnnnnnnnnnnnnnnnnnnnnnnnnnnnnnnnnnnnnnnnnnnnnnnnnnnnnnnnnnnnnnnnnnnnnnnnnnnnnnnnnnnnnnnnnnnnnnnnnnnnnnnnnnnnnnnnnnnnnnnnnnnnnnnnnnnnnnnnnnnnnnnnnnnnnnnnnnnnnnnnnnnnnnnnnnnnnnnnnnnnnnnnnnnnnnnnnnnnnnnnnnnnnnnnnnnnnnnnnnnnnnnnnnnnnnnnnnnnnnnnnnnnnnnnnnnnnnnnnnnnnnnnnnnnnnnnnnnnnnnnnnnnnnnnnnnnnnnnnnnnnnnnnnnnnnnnnnnnnnnnnnnnnnnnnnnnnnnnnnnnnnnnnnnnnnnnnnnnnnnnnnnnnnnnnnnnnnnnnnnnnnnnnnnnnnnnnnnnnnnnnnnnnnnnnnnnnnnnnnnnnnnnnnnnnnnnnnnnnnnnnnnnnnnnnnnnnnnnnnnnnnnnnnnnnnnnnnnnnnnnnnnnnnnnnnnnnnnnnnnnnnnnnnnnnnnnnnnnnnnnnnnnnnnnnnnnnnnnnnnnnnnnnnnnnnnnnnnnnnnnnnnnnnnnnnnnnnnnnnnnnnnnnnnnnnnnnnnnnnnnnnnnnnnnnnnnnnnnnnnnnnnnnnnnnnnnnnnnnnnnnnnnnnnnnnnnnnnnnnnnnnnnnnnnnnnnnnnnnnnnnnnnnnnnnnnnnnnnnnnnnnnnnnnnnnnnnnnnnnnnnnnnnnnnnnnnnnnnnnnnnnnnnnnnnnnnnnnnnnnnnnnnnnnnnnnnnnnnnnnnnnnnnnnnnnnnnnnnnnnnnnnnnnnnnnnnnnnnnnnnnnnnnnnnnnnnnnnnnnnnnnnnnnnnnnnnnnnnnnnnnnnnnnnnnnnnnnnnnnnnnnnnnnnnnnnnnnnnnnnnnnnnnnnnnnnnnnnnnnnnnnnnnnnnnnnnnnnnnnnnnnnnnnnnnnnnnnnnnnnnnnnnnnnnnnnnnnnnnnnnnnnnnnnnnnnnnnnnnnnnnnnnnnnnnnnnnnnnnnnnnnnnnnnnnnnnnnnnnnnnnnnnnnnnnnnnnnnnnnnnnnnnnnnnnnnnnnnnnnnnnnnnnnnnnnnnnnnnnnnnnnnnnnnnnnnnnnnnnnnnnnnnnnnnnnnnnnnnnnnnnnnnnnnnnnnnnnnnnnnnnnnnnnnnnnnnnnnnnnnnnnnnnnnnnnnnnnnnnnnnnnnnnnnnnnnnnnnnnnnnnnnnnnnnnnnnnnnnnnnnnnnnnnnnnnnnnnnnnnnnnnnnnnnnnnnnnnnnnnnnnnnnnnnnnnnnnnnnnnnnnnnnnnnnnnnnnnnnnnnnnnnnnnnnnnnnnnnnnnnnnnnnnnnnnnnnnnnnnnnnnnnnnnnnnnnnnnnnnnnnnnnnnnnnnnnnnnnnnnnnnnnnnnnnnnnnnnnnnnnnnnnnnnnnnnnnnnnnnnnnnnnnnnnnnnnnnnnnnnnnnnnnnnnnnnnnnnnnnnnnnnnnnnnnnnnnnnnnnnnnnnnnnnnnnnnnnnnnnnnnnnnnnnnnnnnnnnnnnnnnnnnnnnnnnnnnnnnnnnnnnnnnnnnnnnnnnnnnnnnnnnnnnnnnnnnnnnnnnnnnnnnnnnnnnnnnnnnnnnnnnnnnnnnnnnnnnnnnnnnnnnnnnnnnnnnnnnnnnnnnnnnnnnnnnnnnnnnnnnnnnnnnnnnnnnnnnnnnnnnnnnnnnnnnnnnnnnnnnnnnnnnnnnnnnnnnnnnnnnnnnnnnnnnnnnnnnnnnnnnnnnnnnnnnnnnnnnnnnnnnnnnnnnnnnnnnnnnnnnnnnnnnnnnnnnnnnnnnnnnnnnnnnnnnnnnnnnnnnnnnnnnnnnnnnnnnnnnnnnnnnnnnnnnnnnnnnnnnnnnnnnnnnnnnnnnnnnnnnnnnnnnnnnnnnnnnnnnnnnnnnnnnnnnnnnnnnnnnnnnnnnnnnnnnnnnnnnnnnnnnnnnnnnnnnnnnnnnnnnnnnnnnnnnnnnnnnnnnnnnnnnnnnnnnnnnnnnnnnnnnnnnnnnnnnnnnnnnnnnnnnnnnnnnnnnnnnnnnnnnnnnnnnnnnnnnnnnnnnnnnnnnnnnnnnnnnnnnnnnnnnnnnnnnnnnnnnnnnnnnnnnnnnnnnnnnnnnnnnnnnnnnnnnnnnnnnnnnnnnnnnnnnnnnnnnnnnnnnnnnnnnnnnnnnnnnnnnnnnnnnnnnnnnnnnnnnnnnnnnnnnnnnnnnnnnnnnnnnnnnnnnnnnnnnnnnnnnnnnnnnnnnnnnnnnnnnnnnnnnnnnnnnnnnnnnnnnnnnnnnnnnnnnnnnnnnnnnnnnnnnnnnnnnnnnnnnnnnnnnnnnnnnnnnnnnnnnnnnnnnnnnnnnnnnnnnnnnnnnnnnnnnnnnnnnnnnnnnnnnnnnnnnnnnnnnnnnnnnnnnnnnnnnnnnnnnnnnnnnnnnnnnnnnnnnnnnnnnnnnnnnnnnnnnnnnnnnnnnnnnnnnnnnnnnnnnnnnnnnnnnnnnnnnnnnnnnnnnnnnnnnnnnnnnnnnnnnnnnnnnnnnnnnnnnnnnnnnnnnnnnnnnnnnnnnnnnnnnnnnnnnnnnnnnnnnnnnnnnnnnnnnnnnnnnnnnnnnnnnnnnnnnnnnnnnnnnnnnnnnnnnnnnnnnnnnnnnnnnnnnnnnnnnnnnnnnnnnnnnnnnnnnnnnnnnnnnnnnnnnnnnnnnnnnnnnnnnnnnnnnnnnnnnnnnnnnnnnnnnnnnnnnnnnnnnnnnnnnnnnnnnnnnnnnnnnnnnnnnnnnnnnnnnnnnnnnnnnnnnnnnnnnnnnnnnnnnnnnnnnnnnnnnnnnnnnnnnnnnnnnnnnnnnnnnnnnnnnnnnnnnnnnnnnnnnnnnnnnnnnnnnnnnnnnnnnnnnnnnnnnnnnnnnnnnnnnnnnnnnnnnnnnnnnnnnnnnnnnnnnnnnnnnnnnnnnnnnnnnnnnnnnnnnnnnnnnnnnnnnnnnnnnnnnnnnnnnnnnnnnnnnnnnnnnnnnnnnnnnnnnnnnnnnnnnnnnnnnnnnnnnnnnnnnnnnnnnnnnnnnnnnnnnnnnnnnnnnnnnnnnnnnnnnnnnnnnnnnnnnnnnnnnnnnnnnnnnnnnnnnnnnnnnnnnnnnnnnnnnnnnnnnnnnnnnnnnnnnnnnnnnnnnnnnnnnnnnnnnnnnnnnnnnnnnnnnnnnnnnnnnnnnnnnnnnnnnnnnnnnnnnnnnnnnnnnnnnnnnnnnnnnnnnnnnnnnnnnnnnnnnnnnnnnnnnnnnnnnnnnnnnnnnnnnnnnnnnnnnnnnnnnnnnnnnnnnnnnnnnnnnnnnnnnnnnnnnnnnnnnnnnnnnnnnnnnnnnnnnnnnnnnnnnnnnnnnnnnnnnnnnnnnnnnnnnnnnnnnnnnnnnnnnnnnnnnnnnnnnnnnnnnnnnnnnnnnnnnnnnnnnnnnnnnnnnnnnnnnnnnnnnnnnnnnnnnnnnnnnnnnnnnnnnnnnnnnnnnnnnnnnnnnnnnnnnnnnnnnnnnnnnnnnnnnnnnnnnnnnnnnnnnnnnnnnnnnnnnnnnnnnnnnnnnnnnnnnnnnnnnnnnnnnnnnnnnnnnnnnnnnnnnnnnnnnnnnnnnnnnnnnnnnnnnnnnnnnnnnnnnnnnnnnnnnnnnnnnnnnnnnnnnnnnnnnnnnnnnnnnnnnnnnnnnnnnnnnnnnnnnnnnnnnnnnnnnnnnnnnnnnnnnnnnnnnnnnnnnnnnnnnnnnnnnnnnnnnnnnnnnnnnnnnnnnnnnnnnnnnnnnnnnnnnnnnnnnnnnnnnnnnnnnnnnnnnnnnnnnnnnnnnnnnnnnnnnnnnnnnnnnnnnnnnnnnnnnnnnnnnnnnnnnnnnnnnnnnnnnnnnnnnnnnnnnnnnnnnnnnnnnnnnnnnnnnnnnnnnnnnnnnnnnnnnnnnnnnnnnnnnnnnnnnnnnnnnnnnnnnnnnnnnnnnnnnnnnnnnnnnnnnnnnnnnnnnnnnnnnnnnnnnnnnnnnnnnnnnnnnnnnnnnnnnnnnnnnnnnnnnnnnnnnnnnnnnnnnnnnnnnnnnnnnnnnnnnnnnnnnnnnnnnnnnnnnnnnnnnnnnnnnnnnnnnnnnnnnnnnnnnnnnnnnnnnnnnnnnnnnnnnnnnnnnnnnnnnnnnnnnnnnnnnnnnnnnnnnnnnnnnnnnnnnnnnnnnnnnnnnnnnnnnnnnnnnnnnnnnnnnnnnnnnnnnnnnnnnnnnnnnnnnnnnnnnnnnnnnnnnnnnnnnnnnnnnnnnnnnnnnnnnnnnnnnnnnnnnnnnnnnnnnnnnnnnnnnnnnnnnnnnnnnnnnnnnnnnnnnnnnnnnnnnnnnnnnnnnnnnnnnnnnnnnnnnnnnnnnnnnnnnnnnnnnnnnnnnnnnnnnnnnnnnnnnnnnnnnnnnnnnnnnnnnnnnnnnnnnnnnnnnnnnnnnnnnnnnnnnnnnnnnnnnnnnnnnnnnnnnnnnnnnnnnnnnnnnnnnnnnnnnnnnnnnnnnnnnnnnnnnnnnnnnnnnnnnnnnnnnnnnnnnnnnnnnnnnnnnnnnnnnnnnnnnnnnnnnnnnnnnnnnnnnnnnnnnnnnnnnnnnnnnnnnnnnnnnnnnnnnnnnnnnnnnnnnnnnnnnnnnnnnnnnnnnnnnnnnnnnnnnnnnnnnnnnnnnnnnnnnnnnnnnnnnnnnnnnnnnnnnnnnnnnnnnnnnnnnnnnnnnnnnnnnnnnnnnnnnnnnnnnnnnnnnnnnnnnnnnnnnnnnnnnnnnnnnnnnnnnnnnnnnnnnnnnnnnnnnnnnnnnnnnnnnnnnnnnnnnnnnnnnnnnnnnnnnnnnnnnnnnnnnnnnnnnnnnnnnnnnnnnnnnnnnnnnnnnnnnnnnnnnnnnnnnnnnnnnnnnnnnnnnnnnnnnnnnnnnnnnnnnnnnnnnnnnnnnnnnnnnnnnnnnnnnnnnnnnnnnnnnnnnnnnnnnnnnnnnnnnnnnnnnnnnnnnnnnnnnnnnnnnnnnnnnnnnnnnnnnnnnnnnnnnnnnnnnnnnnnnnnnnnnnnnnnnnnnnnnnnnnnnnnnnnnnnnnnnnnnnnnnnnnnnnnnnnnnnnnnnnnnnnnnnnnnnnnnnnnnnnnnnnnnnnnnnnnnnnnnnnnnnnnnnnnnnnnnnnnnnnnnnnnnnnnnnnnnnnnnnnnnnnnnnnnnnnnnnnnnnnnnnnnnnnnnnnnnnnnnnnnnnnnnnnnnnnnnnnnnnnnnnnnnnnnnnnnnnnnnnnnnnnnnnnnnnnnnnnnnnnnnnnnnnnnnnnnnnnnnnnnnnnnnnnnnnnnnnnnnnnnnnnnnnnnnnnnnnnnnnnnnnnnnnnnnnnnnnnnnnnnnnnnnnnnnnnnnnnnnnnnnnnnnnnnnnnnnnnnnnnnnnnnnnnnnnnnnnnnnnnnnnnnnnnnnnnnnnnnnnnnnnnnnnnnnnnnnnnnnnnnnnnnnnnnnnnnnnnnnnnnnnnnnnnnnnnnnnnnnnnnnnnnnnnnnnnnnnnnnnnnnnnnnnnnnnnnnnnnnnnnnnnnnnnnnnnnnnnnnnnnnnnnnnnnnnnnnnnnnnnnnnnnnnnnnnnnnnnnnnnnnnnnnnnnnnnnnnnnnnnnnnnnnnnnnnnnnnnnnnnnnnnnnnnnnnnnnnnnnnnnnnnnnnnnnnnnnnnnnnnnnnnnnnnnnnnnnnnnnnnnnnnnnnnnnnnnnnnnnnnnnnnnnnnnnnnnnnnnnnnnnnnnnnnnnnnnnnnnnnnnnnnnnnnnnnnnnnnnnnnnnnnnnnnnnnnnnnnnnnnnnnnnnnnnnnnnnnnnnnnnnnnnnnnnnnnnnnnnnnnnnnnnnnnnnnnnnnnnnnnnnnnnnnnnnnnnnnnnnnnnnnnnnnnnnnnnnnnnnnnnnnnnnnnnnnnnnnnnnnnnnnnnnnnnnnnnnnnnnnnnnnnnnnnnnnnnnnnnnnnnnnnnnnnnnnnnnnnnnnnnnnnnnnnnnnnnnnnnnnnnnnnnnnnnnnnnnnnnnnnnnnnnnnnnnnnnnnnnnnnnnnnnnnnnnnnnnnnnnnnnnnnnnnnnnnnnnnnnnnnnnnnnnnnnnnnnnnnnnnnnnnnnnnnnnnnnnnnnnnnnnnnnnnnnnnnnnnnnnnnnnnnnnnnnnnnnnnnnnnnnnnnnnnnnnnnnnnnnnnnnnnnnnnnnnnnnnnnnnnnnnnnnnnnnnnnnnnnnnnnnnnnnnnnnnnnnnnnnnnnnnnnnnnnnnnnnnnnnnnnnnnnnnnnnnnnnnnnnnnnnnnnnnnnnnnnnnnnnnnnnnnnnnnnnnnnnnnnnnnnnnnnnnnnnnnnnnnnnnnnnnnnnnnnnnnnnnnnnnnnnnnnnnnnnnnnnnnnnnnnnnnnnnnnnnnnnnnnnnnnnnnnnnnnnnnnnnnnnnnnnnnnnnnnnnnnnnnnnnnnnnnnnnnnnnnnnnnnnnnnnnnnnnnnnnnnnnnnnnnnnnnnnnnnnnnnnnnnnnnnnnnnnnnnnnnnnnnnnnnnnnnnnnnnnnnnnnnnnnnnnnnnnnnnnnnnnnnnnnnnnnnnnnnnnnnnnnnnnnnnnnnnnnnnnnnnnnnnnnnnnnnnnnnnnnnnnnnnnnnnnnnnnnnnnnnnnnnnnnnnnnnnnnnnnnnnnnnnnnnnnnnnnnnnnnnnnnnnnnnnnnnnnnnnnnnnnnnnnnnnnnnnnnnnnnnnnnnnnnnnnnnnnnnnnnnnnnnnnnnnnnnnnnnnnnnnnnnnnnnnnnnnnnnnnnnnnnnnnnnnnnnnnnnnnnnnnnnnnnnnnnnnnnnnnnnnnnnnnnnnnnnnnnnnnnnnnnnnnnnnnnnnnnnnnnnnnnnnnnnnnnnnnnnnnnnnnnnnnnnnnnnnnnnnnnnnnnnnnnnnnnnnnnnnnnnnnnnnnnnnnnnnnnnnnnnnnnnnnnnnnnnnnnnnnnnnnnnnnnnnnnnnnnnnnnnnnnnnnnnnnnnnnnnnnnnnnnnnnnnnnnnnnnnnnnnnnnnnnnnnnnnnnnnnnnnnnnnnnnnnnnnnnnnnnnnnnnnnnnnnnnnnnnnnnnnnnnnnnnnnnnnnnnnnnnnnnnnnnnnnnnnnnnnnnnnnnnnnnnnnnnnnnnnnnnnnnnnnnnnnnnnnnnnnnnnnnnnnnnnnnnnnnnnnnnnnnnnnnnnnnnnnnnnnnnnnnnnnnnnnnnnnnnnnnnnnnnnnnnnnnnnnnnnnnnnnnnnnnnnnnnnnnnnnnnnnnnnnnnnnnnnnnnnnnnnnnnnnnnnnnnnnnnnnnnnnnnnnnnnnnnnnnnnnnnnnnnnnnnnnnnnnnnnnnnnnnnnnnnnnnnnnnnnnnnnnnnnnnnnnnnnnnnnnnnnnnnnnnnnnnnnnnnnnnnnnnnnnnnnnnnnnnnnnnnnnnnnnnnnnnnnnnnnnnnnnnnnnnnnnnnnnnnnnnnnnnnnnnnnnnnnnnnnnnnnnnnnnnnnnnnnnnnnnnnnnnnnnnnnnnnnnnnnnnnnnnnnnnnnnnnnnnnnnnnnnnnnnnnnnnnnnnnnnnnnnnnnnnnnnnnnnnnnnnnnnnnnnnnnnnnnnnnnnnnnnnnnnnnnnnnnnnnnnnnnnnnnnnnnnnnnnnnnnnnnnnnnnnnnnnnnnnnnnnnnnnnnnnnnnnnnnnnnnnnnnnnnnnnnnnnnnnnnnnnnnnnnnnnnnnnnnnnnnnnnnnnnnnnnnnnnnnnnnnnnnnnnnnnnnnnnnnnnnnnnnnnnnnnnnnnnnnnnnnnnnnnnnnnnnnnnnnnnnnnnnnnnnnnnnnnnnnnnnnnnnnnnnnnnnnnnnnnnnnnnnnnnnnnnnnnnnnnnnnnnnnnnnnnnnnnnnnnnnnnnnnnnnnnnnnnnnnnnnnnnnnnnnnnnnnnnnnnnnnnnnnnnnnnnnnnnnnnnnnnnnnnnnnnnnnnnnnnnnnnnnnnnnnnnnnnnnnnnnnnnnnnnnnnnnnnnnnnnnnnnnnnnnnnnnnnnnnnnnnnnnnnnnnnnnnnnnnnnnnnnnnnnnnnnnnnnnnnnnnnnnnnnnnnnnnnnnnnnnnnnnnnnnnnnnnnnnnnnnnnnnnnnnnnnnnnnnnnnnnnnnnnnnnnnnnnnnnnnnnnnnnnnnnnnnnnnnnnnnnnnnnnnnnnnnnnnnnnnnnnnnnnnnnnnnnnnnnnnnnnnnnnnnnnnnnnnnnnnnnnnnnnnnnnnnnnnnnnnnnnnnnnnnnnnnnnnnnnnnnnnnnnnnnnnnnnnnnnnnnnnnnnnnnnnnnnnnnnnnnnnnnnnnnnnnnnnnnnnnnnnnnnnnnnnnnnnnnnnnnnnnnnnnnnnnnnnnnnnnnnnnnnnnnnnnnnnnnnnnnnnnnnnnnnnnnnnnnnnnnnnnnnnnnnnnnnnnnnnnnnnnnnnnnnnnnnnnnnnnnnnnnnnnnnnnnnnnnnnnnnnnnnnnnnnnnnnnnnnnnnnnnnnnnnnnnnnnnnnnnnnnnnnnnnnnnnnnnnnnnnnnnnnnnnnnnnnnnnnnnnnnnnnnnnnnnnnnnnnnnnnnnnnnnnnnnnnnnnnnnnnnnnnnnnnnnnnnnnnnnnnnnnnnnnnnnnnnnnnnnnnnnnnnnnnnnnnnnnnnnnnnnnnnnnnnnnnnnnnnnnnnnnnnnnnnnnnnnnnnnnnnnnnnnnnnnnnnnnnnnnnnnnnnnnnnnnnnnnnnnnnnnnnnnnnnnnnnnnnnnnnnnnnnnnnnnnnnnnnnnnnnnnnnnnnnnnnnnnnnnnnnnnnnnnnnnnnnnnnnnnnnnnnnnnnnnnnnnnnnnnnnnnnnnnnnnnnnnnnnnnnnnnnnnnnnnnnnnnnnnnnnnnnnnnnnnnnnnnnnnnnnnnnnnnnnnnnnnnnnnnnnnnnnnnnnnnnnnnnnnnnnnnnnnnnnnnnnnnnnnnnnnnnnnnnnnnnnnnnnnnnnnnnnnnnnnnnnnnnnnnnnnnnnnnnnnnnnnnnnnnnnnnnnnnnnnnnnnnnnnnnnnnnnnnnnnnnnnnnnnnnnnnnnnnnnnnnnnnnnnnnnnnnnnnnnnnnnnnnnnnnnnnnnnnnnnnnnnnnnnnnnnnnnnnnnnnnnnnnnnnnnnnnnnnnnnnnnnnnnnnnnnnnnnnnnnnnnnnnnnnnnnnnnnnnnnnnnnnnnnnnnnnnnnnnnnnnnnnnnnnnnnnnnnnnnnnnnnnnnnnnnnnnnnnnnnnnnnnnnnnnnnnnnnnnnnnnnnnnnnnnnnnnnnnnnnnnnnnnnnnnnnnnnnnnnnnnnnnnnnnnnnnnnnnnnnnnnnnnnnnnnnnnnnnnnnnnnnnnnnnnnnnnnnnnnnnnnnnnnnnnnnnnnnnnnnnnnnnnnnnnnnnnnnnnnnnnnnnnnnnnnnnnnnnnnnnnnnnnnnnnnnnnnnnnnnnnnnnnnnnnnnnnnnnnnnnnnnnnnnnnnnnnnnnnnnnnnnnnnnnnnnnnnnnnnnnnnnnnnnnnnnnnnnnnnnnnnnnnnnnnnnnnnnnnnnnnnnnnnnnnnnnnnnnnnnnnnnnnnnnnnnnnnnnnnnnnnnnnnnnnnnnnnnnnnnnnnnnnnnnnnnnnnnnnnnnnnnnnnnnnnnnnnnnnnnnnnnnnnnnnnnnnnnnnnnnnnnnnnnnnnnnnnnnnnnnnnnnnnnnnnnnnnnnnnnnnnnnnnnnnnnnnnnnnnnnnnnnnnnnnnnnnnnnnnnnnnnnnnnnnnnnnnnnnnnnnnnnnnnnnnnnnnnnnnnnnnnnnnnnnnnnnnnnnnnnnnnnnnnnnnnnnnnnnnnnnnnnnnnnnnnnnnnnnnnnnnnnnnnnnnnnnnnnnnnnnnnnnnnnnnnnnnnnnnnnnnnnnnnnnnnnnnnnnnnnnnnnnnnnnnnnnnnnnnnnnnnnnnnnnnnnnnnnnnnnnnnnnnnnnnnnnnnnnnnnnnnnnnnnnnnnnnnnnnnnnnnnnnnnnnnnnnnnnnnnnnnnnnnnnnnnnnnnnnnnnnnnnnnnnnnnnnnnnnnnnnnnnnnnnnnnnnnnnnnnnnnnnnnnnnnnnnnnnnnnnnnnnnnnnnnnnnnnnnnnnnnnnnnnnnnnnnnnnnnnnnnnnnnnnnnnnnnnnnnnnnnnnnnnnnnnnnnnnnnnnnnnnnnnnnnnnnnnnnnnnnnnnnnnnnnnnnnnnnnnnnnnnnnnnnnnnnnnnnnnnnnnnnnnnnnnnnnnnnnnnnnnnnnnnnnnnnnnnnnnnnnnnnnnnnnnnnnnnnnnnnnnnnnnnnnnnnnnnnnnnnnnnnnnnnnnnnnnnnnnnnnnnnnnnnnnnnnnnnnnnnnnnnnnnnnnnnnnnnnnnnnnnnnnnnnnnnnnnnnnnnnnnnnnnnnnnnnnnnnnnnnnnnnnnnnnnnnnnnnnnnnnnnnnnnnnnnnnnnnnnnnnnnnnnnnnnnnnnnnnnnnnnnnnnnnnnnnnnnnnnnnnnnnnnnnnnnnnnnnnnnnnnnnnnnnnnnnnnnnnnnnnnnnnnnnnnnnnnnnnnnnnnnnnnnnnnnnnnnnnnnnnnnnnnnnnnnnnnnnnnnnnnnnnnnnnnnnnnnnnnnnnnnnnnnnnnnnnnnnnnnnnnnnnnnnnnnnnnnnnnnnnnnnnnnnnnnnnnnnnnnnnnnnnnnnnnnnnnnnnnnnnnnnnnnnnnnnnnnnnnnnnnnnnnnnnnnnnnnnnnnnnnnnnnnnnnnnnnnnnnnnnnnnnnnnnnnnnnnnnnnnnnnnnnnnnnnnnnnnnnnnnnnnnnnnnnnnnnnnnnnnnnnnnnnnnnnnnnnnnnnnnnnnnnnnnnnnnnnnnnnnnnnnnnnnnnnnnnnnnnnnnnnnnnnnnnnnnnnnnnnnnnnnnnnnnnnnnnnnnnnnnnnnnnnnnnnnnnnnnnnnnnnnnnnnnnnnnnnnnnnnnnnnnnnnnnnnnnnnnnnnnnnnnnnnnnnnnnnnnnnnnnnnnnnnnnnnnnnnnnnnnnnnnnnnnnnnnnnnnnnnnnnnnnnnnnnnnnnnnnnnnnnnnnnnnnnnnnnnnnnnnnnnnnnnnnnnnnnnnnnnnnnnnnnnnnnnnnnnnnnnnnnnnnnnnnnnnnnnnnnnnnnnnnnnnnnnnnnnnnnnnnnnnnnnnnnnnnnnnnnnnnnnnnnnnnnnnnnnnnnnnnnnnnnnnnnnnnnnnnnnnnnnnnnnnnnnnnnnnnnnnnnnnnnnnnnnnnnnnnnnnnnnnnnnnnnnnnnnnnnnnnnnnnnnnnnnnnnnnnnnnnnnnnnnnnnnnnnnnnnnnnnnnnnnnnnnnnnnnnnnnnnnnnnnnnnnnnnnnnnnnnnnnnnnnnnnnnnnnnnnnnnnnnnnnnnnnnnnnnnnnnnnnnnnnnnnnnnnnnnnnnnnnnnnnnnnnnnnnnnnnnnnnnnnnnnnnnnnnnnnnnnnnnnnnnnnnnnnnnnnnnnnnnnnnnnnnnnnnnnnnnnnnnnnnnnnnnnnnnnnnnnnnnnnnnnnnnnnnnnnnnnnnnnnnnnnnnnnnnnnnnnnnnnnnnnnnnnnnnnnnnnnnnnnnnnnnnnnnnnnnnnnnnnnnnnnnnnnnnnnnnnnnnnnnnnnnnnnnnnnnnnnnnnnnnnnnnnnnnnnnnnnnnnnnnnnnnnnnnnnnnnnnnnnnnnnnnnnnnnnnnnnnnnnnnnnnnnnnnnnnnnnnnnnnnnnnnnnnnnnnnnnnnnnnnnnnnnnnnnnnnnnnnnnnnnnnnnnnnnnnnnnnnnnnnnnnnnnnnnnnnnnnnnnnnnnnnnnnnnnnnnnnnnnnnnnnnnnnnnnnnnnnnnnnnnnnnnnnnnnnnnnnnnnnnnnnnnnnnnnnnnnnnnnnnnnnnnnnnnnnnnnnnnnnnnnnnnnnnnnnnnnnnnnnnnnnnnnnnnnnnnnnnnnnnnnnnnnnnnnnnnnnnnnnnnnnnnnnnnnnnnnnnnnnnnnnnnnnnnnnnnnnnnnnnnnnnnnnnnnnnnnnnnnnnnnnnnnnnnnnnnnnnnnnnnnnnnnnnnnnnnnnnnnnnnnnnnnnnnnnnnnnnnnnnnnnnnnnnnnnnnnnnnnnnnnnnnnnnnnnnnnnnnnnnnnnnnnnnnnnnnnnnnnnnnnnnnnnnnnnnnnnnnnnnnnnnnnnnnnnnnnnnnnnnnnnnnnnnnnnnnnnnnnnnnnnnnnnnnnnnnnnnnnnnnnnnnnnnnnnnnnnnnnnnnnnnnnnnnnnnnnnnnnnnnnnnnnnnnnnnnnnnnnnnnnnnnnnnnnnnnnnnnnnnnnnnnnnnnnnnnnnnnnnnnnnnnnnnnnnnnnnnnnnnnnnnnnnnnnnnnnnnnnnnnnnnnnnnnnnnnnnnnnnnnnnnnnnnnnnnnnnnnnnnnnnnnnnnnnnnnnnnnnnnnnnnnnnnnnnnnnnnnnnnnnnnnnnnnnnnnnnnnnnnnnnnnnnnnnnnnnnnnnnnnnnnnnnnnnnnnnnnnnnnnnnnnnnnnnnnnnnnnnnnnnnnnnnnnnnnnnnnnnnnnnnnnnnnnnnnnnnnnnnnnnnnnnnnnnnnnnnnnnnnnnnnnnnnnnnnnnnnnnnnnnnnnnnnnnnnnnnnnnnnnnnnnnnnnnnnnnnnnnnnnnnnnnnnnnnnnnnnnnnnnnnnnnnnnnnnnnnnnnnnnnnnnnnnnnnnnnnnnnnnnnnnnnnnnnnnnnnnnnnnnnnnnnnnnnnnnnnnnnnnnnnnnnnnnnnnnnnnnnnnnnnnnnnnnnnnnnnnnnnnnnnnnnnnnnnnnnnnnnnnnnnnnnnnnnnnnnnnnnnnnnnnnnnnnnnnnnnnnnnnnnnnnnnnnnnnnnnnnnnnnnnnnnnnnnnnnnnnnnnnnnnnnnnnnnnnnnnnnnnnnnnnnnnnnnnnnnnnnnnnnnnnnnnnnnnnnnnnnnnnnnnnnnnnnnnnnnnnnnnnnnnnnnnnnnnnnnnnnnnnnnnnnnnnnnnnnnnnnnnnnnnnnnnnnnnnnnnnnnnnnnnnnnnnnnnnnnnnnnnnnnnnnnnnnnnnnnnnnnnnnnnnnnnnnnnnnnnnnnnnnnnnnnnnnnnnnnnnnnnnnnnnnnnnnnnnnnnnnnnnnnnnnnnnnnnnnnnnnnnnnnnnnnnnnnnnnnnnnnnnnnnnnnnnnnnnnnnnnnnnnnnnnnnnnnnnnnnnnnnnnnnnnnnnnnnnnnnnnnnnnnnnnnnnnnnnnnnnnnnnnnnnnnnnnnnnnnnnnnnnnnnnnnnnnnnnnnnnnnnnnnnnnnnnnnnnnnnnnnnnnnnnnnnnnnnnnnnnnnnnnnnnnnnnnnnnnnnnnnnnnnnnnnnnnnnnnnnnnnnnnnnnnnnnnnnnnnnnnnnnnnnnnnnnnnnnnnnnnnnnnnnnnnnnnnnnnnnnnnnnnnnnnnnnnnnnnnnnnnnnnnnnnnnnnnnnnnnnnnnnnnnnnnnnnnnnnnnnnnnnnnnnnnnnnnnnnnnnnnnnnnnnnnnnnnnnnnnnnnnnnnnnnnnnnnnnnnnnnnnnnnnnnnnnnnnnnnnnnnnnnnnnnnnnnnnnnnnnnnnnnnnnnnnnnnnnnnnnnnnnnnnnnnnnnnnnnnnnnnnnnnnnnnnnnnnnnnnnnnnnnnnnnnnnnnnnnnnnnnnnnnnnnnnnnnnnnnnnnnnnnnnnnnnnnnnnnnnnnnnnnnnnnnnnnnnnnnnnnnnnnnnnnnnnnnnnnnnnnnnnnnnnnnnnnnnnnnnnnnnnnnnnnnnnnnnnnnnnnnnnnnnnnnnnnnnnnnnnnnnnnnnnnnnnnnnnnnnnnnnnnnnnnnnnnnnnnnnnnnnnnnnnnnnnnnnnnnnnnnnnnnnnnnnnnnnnnnnnnnnnnnnnnnnnnnnnnnnnnnnnnnnnnnnnnnnnnnnnnnnnnnnnnnnnnnnnnnnnnnnnnnnnnnnnnnnnnnnnnnnnnnnnnnnnnnnnnnnnnnnnnnnnnnnnnnnnnnnnnnnnnnnnnnnnnnnnnnnnnnnnnnnnnnnnnnnnnnnnnnnnnnnnnnnnnnnnnnnnnnnnnnnnnnnnnnnnnnnnnnnnnnnnnnnnnnnnnnnnnnnnnnnnnnnnnnnnnnnnnnnnnnnnnnnnnnnnnnnnnnnnnnnnnnnnnnnnnnnnnnnnnnnnnnnnnnnnnnnnnnnnnnnnnnnnnnnnnnnnnnnnnnnnnnnnnnnnnnnnnnnnnnnnnnnnnnnnnnnnnnnnnnnnnnnnnnnnnnnnnnnnnnnnnnnnnnnnnnnnnnnnnnnnnnnnnnnnnnnnnnnnnnnnnnnnnnnnnnnnnnnnnnnnnnnnnnnnnnnnnnnnnnnnnnnnnnnnnnnnnnnnnnnnnnnnnnnnnnnnnnnnnnnnnnnnnnnnnnnnnnnnnnnnnnnnnnnnnnnnnnnnnnnnnnnnnnnnnnnnnnnnnnnnnnnnnnnnnnnnnnnnnnnnnnnnnnnnnnnnnnnnnnnnnnnnnnnnnnnnnnnnnnnnnnnnnnnnnnnnnnnnnnnnnnnnnnnnnnnnnnnnnnnnnnnnnnnnnnnnnnnnnnnnnnnnnnnnnnnnnnnnnnnnnnnnnnnnnnnnnnnnnnnnnnnnnnnnnnnnnnnnnnnnnnnnnnnnnnnnnnnnnnnnnnnnnnnnnnnnnnnnnnnnnnnnnnnnnnnnnnnnnnnnnnnnnnnnnnnnnnnnnnnnnnnnnnnnnnnnnnnnnnnnnnnnnnnnnnnnnnnnnnnnnnnnnnnnnnnnnnnnnnnnnnnnnnnnnnnnnnnnnnnnnnnnnnnnnnnnnnnnnnnnnnnnnnnnnnnnnnnnnnnnnnnnnnnnnnnnnnnnnnnnnnnnnnnnnnnnnnnnnnnnnnnnnnnnnnnnnnnnnnnnnnnnnnnnnnnnnnnnnnnnnnnnnnnnnnnnnnnnnnnnnnnnnnnnnnnnnnnnnnnnnnnnnnnnnnnnnnnnnnnnnnnnnnnnnnnnnnnnnnnnnnnnnnnnnnnnnnnnnnnnnnnnnnnnnnnnnnnnnnnnnnnnnnnnnnnnnnnnnnnnnnnnnnnnnnnnnnnnnnnnnnnnnnnnnnnnnnnnnnnnnnnnnnnnnnnnnnnnnnnnnnnnnnnnnnnnnnnnnnnnnnnnnnnnnnnnnnnnnnnnnnnnnnnnnnnnnnnnnnnnnnnnnnnnnnnnnnnnnnnnnnnnnnnnnnnnnnnnnnnnnnnnnnnnnnnnnnnnnnnnnnnnnnnnnnnnnnnnnnnnnnnnnnnnnnnnnnnnnnnnnnnnnnnnnnnnnnnnnnnnnnnnnnnnnnnnnnnnnnnnnnnnnnnnnnnnnnnnnnnnnnnnnnnnnnnnnnnnnnnnnnnnnnnnnnnnnnnnnnnnnnnnnnnnnnnnnnnnnnnnnnnnnnnnnnnnnnnnnnnnnnnnnnnnnnnnnnnnnnnnnnnnnnnnnnnnnnnnnnnnnnnnnnnnnnnnnnnnnnnnnnnnnnnnnnnnnnnnnnnnnnnnnnnnnnnnnnnnnnnnnnnnnnnnnnnnnnnnnnnnnnnnnnnnnnnnnnnnnnnnnnnnnnnnnnnnnnnnnnnnnnnnnnnnnnnnnnnnnnnnnnnnnnnnnnnnnnnnnnnnnnnnnnnnnnnnnnnnnnnnnnnnnnnnnnnnnnnnnnnnnnnnnnnnnnnnnnnnnnnnnnnnnnnnnnnnnnnnnnnnnnnnnnnnnnnnnnnnnnnnnnnnnnnnnnnnnnnnnnnnnnnnnnnnnnnnnnnnnnnnnnnnnnnnnnnnnnnnnnnnnnnnnnnnnnnnnnnnnnnnnnnnnnnnnnnnnnnnnnnnnnnnnnnnnnnnnnnnnnnnnnnnnnnnnnnnnnnnnnnnnnnnnnnnnnnnnnnnnnnnnnnnnnnnnnnnnnnnnnnnnnnnnnnnnnnnnnnnnnnnnnnnnnnnnnnnnnnnnnnnnnnnnnnnnnnnnnnnnnnnnnnnnnnnnnnnnnnnnnnnnnnnnnnnnnnnnnnnnnnnnnnnnnnnnnnnnnnnnnnnnnnnnnnnnnnnnnnnnnnnnnnnnnnnnnnnnnnnnnnnnnnnnnnnnnnnnnnnnnnnnnnnnnnnnnnnnnnnnnnnnnnnnnnnnnnnnnnnnnnnnnnnnnnnnnnnnnnnnnnnnnnnnnnnnnnnnnnnnnnnnnnnnnnnnnnnnnnnnnnnnnnnnnnnnnnnnnnnnnnnnnnnnnnnnnnnnnnnnnnnnnnnnnnnnnnnnnnnnnnnnnnnnnnnnnnnnnnnnnnnnnnnnnnnnnnnnnnnnnnnnnnnnnnnnnnnnnnnnnnnnnnnnnnnnnnnnnnnnnnnnnnnnnnnnnnnnnnnnnnnnnnnnnnnnnnnnnnnnnnnnnnnnnnnnnnnnnnnnnnnnnnnnnnnnnnnnnnnnnnnnnnnnnnnnnnnnnnnnnnnnnnnnnnnnnnnnnnnnnnnnnnnnnnnnnnnnnnnnnnnnnnnnnnnnnnnnnnnnnnnnnnnnnnnnnnnnnnnnnnnnnnnnnnnnnnnnnnnnnnnnnnnnnnnnnnnnnnnnnnnnnnnnnnnnnnnnnnnnnnnnnnnnnnnnnnnnnnnnnnnnnnnnnnnnnnnnnnnnnnnnnnnnnnnnnnnnnnnnnnnnnnnnnnnnnnnnnnnnnnnnnnnnnnnnnnnnnnnnnnnnnnnnnnnnnnnnnnnnnnnnnnnnnnnnnnnnnnnnnnnnnnnnnnnnnnnnnnnnnnnnnnnnnnnnnnnnnnnnnnnnnnnnnnnnnnnnnnnnnnnnnnnnnnnnnnnnnnnnnnnnnnnnnnnnnnnnnnnnnnnnnnnnnnnnnnnnnnnnnnnnnnnnnnnnnnnnnnnnnnnnnnnnnnnnnnnnnnnnnnnnnnnnnnnnnnnnnnnnnnnnnnnnnnnnnnnnnnnnnnnnnnnnnnnnnnnnnnnnnnnnnnnnnnnnnnnnnnnnnnnnnnnnnnnnnnnnnnnnnnnnnnnnnnnnnnnnnnnnnnnnnnnnnnnnnnnnnnnnnnnnnnnnnnnnnnnnnnnnnnnnnnnnnnnnnnnnnnnnnnnnnnnnnnnnnnnnnnnnnnnnnnnnnnnnnnnnnnnnnnnnnnnnnnnnnnnnnnnnnnnnnnnnnnnnnnnnnnnnnnnnnnnnnnnnnnnnnnnnnnnnnnnnnnnnnnnnnnnnnnnnnnnnnnnnnnnnnnnnnnnnnnnnnnnnnnnnnnnnnnnnnnnnnnnnnnnnnnnnnnnnnnnnnnnnnnnnnnnnnnnnnnnnnnnnnnnnnnnnnnnnnnnnnnnnnnnnnnnnnnnnnnnnnnnnnnnnnnnnnnnnnnnnnnnnnnnnnnnnnnnnnnnnnnnnnnnnnnnnnnnnnnnnnnnnnnnnnnnnnnnnnnnnnnnnnnnnnnnnnnnnnnnnnnnnnnnnnnnnnnnnnnnnnnnnnnnnnnnnnnnnnnnnnnnnnnnnnnnnnnnnnnnnnnnnnnnnnnnnnnnnnnnnnnnnnnnnnnnnnnnnnnnnnnnnnnnnnnnnnnnnnnnnnnnnnnnnnnnnnnnnnnnnnnnnnnnnnnnnnnnnnnnnnnnnnnnnnnnnnnnnnnnnnnnnnnnnnnnnnnnnnnnnnnnnnnnnnnnnnnnnnnnnnnnnnnnnnnnnnnnnnnnnnnnnnnnnnnnnnnnnnnnnnnnnnnnnnnnnnnnnnnnnnnnnnnnnnnnnnnnnnnnnnnnnnnnnnnnnnnnnnnnnnnnnnnnnnnnnnnnnnnnnnnnnnnnnnnnnnnnnnnnnnnnnnnnnnnnnnnnnnnnnnnnnnnnnnnnnnnnnnnnnnnnnnnnnnnnnnnnnnnnnnnnnnnnnnnnnnnnnnnnnnnnnnnnnnnnnnnnnnnnnnnnnnnnnnnnnnnnnnnnnnnnnnnnnnnnnnnnnnnnnnnnnnnnnnnnnnnnnnnnnnnnnnnnnnnnnnnnnnnnnnnnnnnnnnnnnnnnnnnnnnnnnnnnnnnnnnnnnnnnnnnnnnnnnnnnnnnnnnnnnnnnnnnnnnnnnnnnnnnnnnnnnnnnnnnnnnnnnnnnnnnnnnnnnnnnnnnnnnnnnnnnnnnnnnnnnnnnnnnnnnnnnnnnnnnnnnnnnnnnnnnnnnnnnnnnnnnnnnnnnnnnnnnnnnnnnnnnnnnnnnnnnnnnnnnnnnnnnnnnnnnnnnnnnnnnnnnnnnnnnnnnnnnnnnnnnnnnnnnnnnnnnnnnnnnnnnnnnnnnnnnnnnnnnnnnnnnnnnnnnnnnnnnnnnnnnnnnnnnnnnnnnnnnnnnnnnnnnnnnnnnnnnnnnnnnnnnnnnnnnnnnnnnnnnnnnnnnnnnnnnnnnnnnnnnnnnnnnnnnnnnnnnnnnnnnnnnnnnnnnnnnnnnnnnnnnnnnnnnnnnnnnnnnnnnnnnnnnnnnnnnnnnnnnnnnnnnnnnnnnnnnnnnnnnnnnnnnnnnnnnnnnnnnnnnnnnnnnnnnnnnnnnnnnnnnnnnnnnnnnnnnnnnnnnnnnnnnnnnnnnnnnnnnnnnnnnnnnnnnnnnnnnnnnnnnnnnnnnnnnnnnnnnnnnnnnnnnnnnnnnnnnnnnnnnnnnnnnnnnnnnnnnnnnnnnnnnnnnnnnnnnnnnnnnnnnnnnnnnnnnnnnnnnnnnnnnnnnnnnnnnnnnnnnnnnnnnnnnnnnnnnnnnnnnnnnnnnnnnnnnnnnnnnnnnnnnnnnnnnnnnnnnnnnnnnnnnnnnnnnnnnnnnnnnnnnnnnnnnnnnnnnnnnnnnnnnnnnnnnnnnnnnnnnnnnnnnnnnnnnnnnnnnnnnnnnnnnnnnnnnnnnnnnnnnnnnnnnnnnnnnnnnnnnnnnnnnnnnnnnnnnnnnnnnnnnnnnnnnnnnnnnnnnnnnnnnnnnnnnnnnnnnnnnnnnnnnnnnnnnnnnnnnnnnnnnnnnnnnnnnnnnnnnnnnnnnnnnnnnnnnnnnnnnnnnnnnnnnnnnnnnnnnnnnnnnnnnnnnnnnnnnnnnnnnnnnnnnnnnnnnnnnnnnnnnnnnnnnnnnnnnnnnnnnnnnnnnnnnnnnnnnnnnnnnnnnnnnnnnnnnnnnnnnnnnnnnnnnnnnnnnnnnnnnnnnnnnnnnnnnnnnnnnnnnnnnnnnnnnnnnnnnnnnnnnnnnnnnnnnnnnnnnnnnnnnnnnnnnnnnnnnnnnnnnnnnnnnnnnnnnnnnnnnnnnnnnnnnnnnnnnnnnnnnnnnnnnnnnnnnnnnnnnnnnnnnnnnnnnnnnnnnnnnnnnnnnnnnnnnnnnnnnnnnnnnnnnnnnnnnnnnnnnnnnnnnnnnnnnnnnnnnnnnnnnnnnnnnnnnnnnnnnnnnnnnnnnnnnnnnnnnnnnnnnnnnnnnnnnnnnnnnnnnnnnnnnnnnnnnnnnnnnnnnnnnnnnnnnnnnnnnnnnnnnnnnnnnnnnnnnnnnnnnnnnnnnnnnnnnnnnnnnnnnnnnnnnnnnnnnnnnnnnnnnnnnnnnnnnnnnnnnnnnnnnnnnnnnnnnnnnnnnnnnnnnnnnnnnnnnnnnnnnnnnnnnnnnnnnnnnnnnnnnnnnnnnnnnnnnnnnnnnnnnnnnnnnnnnnnnnnnnnnnnnnnnnnnnnnnnnnnnnnnnnnnnnnnnnnnnnnnnnnnnnnnnnnnnnnnnnnnnnnnnnnnnnnnnnnnnnnnnnnnnnnnnnnnnnnnnnnnnnnnnnnnnnnnnnnnnnnnnnnnnnnnnnnnnnnnnnnnnnnnnnnnnnnnnnnnnnnnnnnnnnnnnnnnnnnnnnnnnnnnnnnnnnnnnnnnnnnnnnnnnnnnnnnnnnnnnnnnnnnnnnnnnnnnnnnnnnnnnnnnnnnnnnnnnnnnnnnnnnnnnnnnnnnnnnnnnnnnnnnnnnnnnnnnnnnnnnnnnnnnnnnnnnnnnnnnnnnnnnnnnnnnnnnnnnnnnnnnnnnnnnnnnnnnnnnnnnnnnnnnnnnnnnnnnnnnnnnnnnnnnnnnnnnnnnnnnnnnnnnnnnnnnnnnnnnnnnnnnnnnnnnnnnnnnnnnnnnnnnnnnnnnnnnnnnnnnnnnnnnnnnnnnnnnnnnnnnnnnnnnnnnnnnnnnnnnnnnnnnnnnnnnnnnnnnnnnnnnnnnnnnnnnnnnnnnnnnnnnnnnnnnnnnnnnnnnnnnnnnnnnnnnnnnnnnnnnnnnnnnnnnnnnnnnnnnnnnnnnnnnnnnnnnnnnnnnnnnnnnnnnnnnnnnnnnnnnnnnnnnnnnnnnnnnnnnnnnnnnnnnnnnnnnnnnnnnnnnnnnnnnnnnnnnnnnnnnnnnnnnnnnnnnnnnnnnnnnnnnnnnnnnnnnnnnnnnnnnnnnnnnnnnnnnnnnnnnnnnnnnnnnnnnnnnnnnnnnnnnnnnnnnnnnnnnnnnnnnnnnnnnnnnnnnnnnnnnnnnnnnnnnnnnnnnnnnnnnnnnnnnnnnnnnnnnnnnnnnnnnnnnnnnnnnnnnnnnnnnnnnnnnnnnnnnnnnnnnnnnnnnnnnnnnnnnnnnnnnnnnnnnnnnnnnnnnnnnnnnnnnnnnnnnnnnnnnnnnnnnnnnnnnnnnnnnnnnnnnnnnnnnnnnnnnnnnnnnnnnnnnnnnnnnnnnnnnnnnnnnnnnnnnnnnnnnnnnnnnnnnnnnnnnnnnnnnnnnnnnnnnnnnnnnnnnnnnnnnnnnnnnnnnnnnnnnnnnnnnnnnnnnnnnnnnnnnnnnnnnnnnnnnnnnnnnnnnnnnnnnnnnnnnnnnnnnnnnnnnnnnnnnnnnnnnnnnnnnnnnnnnnnnnnnnnnnnnnnnnnnnnnnnnnnnnnnnnnnnnnnnnnnnnnnnnnnnnnnnnnnnnnnnnnnnnnnnnnnnnnnnnnnnnnnnnnnnnnnnnnnnnnnnnnnnnnnnnnnnnnnnnnnnnnnnnnnnnnnnnnnnnnnnnnnnnnnnnnnnnnnnnnnnnnnnnnnnnnnnnnnnnnnnnnnnnnnnnnnnnnnnnnnnnnnnnnnnnnnnnnnnnnnnnnnnnnnnnnnnnnnnnnnnnnnnnnnnnnnnnnnnnnnnnnnnnnnnnnnnnnnnnnnnnnnnnnnnnnnnnnnnnnnnnnnnnnnnnnnnnnnnnnnnnnnnnnnnnnnnnnnnnnnnnnnnnnnnnnnnnnnnnnnnnnnnnnnnnnnnnnnnnnnnnnnnnnnnnnnnnnnnnnnnnnnnnnnnnnnnnnnnnnnnnnnnnnnnnnnnnnnnnnnnnnnnnnnnnnnnnnnnnnnnnnnnnnnnnnnnnnnnnnnnnnnnnnnnnnnnnnnnnnnnnnnnnnnnnnnnnnnnnnnnnnnnnnnnnnnnnnnnnnnnnnnnnnnnnnnnnnnnnnnnnnnnnnnnnnnnnnnnnnnnnnnnnnnnnnnnnnnnnnnnnnnnnnnnnnnnnnnnnnnnnnnnnnnnnnnnnnnnnnnnnnnnnnnnnnnnnnnnnnnnnnnnnnnnnnnnnnnnnnnnnnnnnnnnnnnnnnnnnnnnnnnnnnnnnnnnnnnnnnnnnnnnnnnnnnnnnnnnnnnnnnnnnnnnnnnnnnnnnnnnnnnnnnnnnnnnnnnnnnnnnnnnnnnnnnnnnnnnnnnnnnnnnnnnnnnnnnnnnnnnnnnnnnnnnnnnnnnnnnnnnnnnnnnnnnnnnnnnnnnnnnnnnnnnnnnnnnnnnnnnnnnnnnnnnnnnnnnnnnnnnnnnnnnnnnnnnnnnnnnnnnnnnnnnnnnnnnnnnnnnnnnnnnnnnnnnnnnnnnnnnnnnnnnnnnnnnnnnnnnnnnnnnnnnnnnnnnnnnnnnnnnnnnnnnnnnnnnnnnnnnnnnnnnnnnnnnnnnnnnnnnnnnnnnnnnnnnnnnnnnnnnnnnnnnnnnnnnnnnnnnnnnnnnnnnnnnnnnnnnnnnnnnnnnnnnnnnnnnnnnnnnnnnnnnnnnnnnnnnnnnnnnnnnnnnnnnnnnnnnnnnnnnnnnnnnnnnnnnnnnnnnnnnnnnnnnnnnnnnnnnnnnnnnnnnnnnnnnnnnnnnnnnnnnnnnnnnnnnnnnnnnnnnnnnnnnnnnnnnnnnnnnnnnnnnnnnnnnnnnnnnnnnnnnnnnnnnnnnnnnnnnnnnnnnnnnnnnnnnnnnnnnnnnnnnnnnnnnnnnnnnnnnnnnnnnnnnnnnnnnnnnnnnnnnnnnnnnnnnnnnnnnnnnnnnnnnnnnnnnnnnnnnnnnnnnnnnnnnnnnnnnnnnnnnnnnnnnnnnnnnnnnnnnnnnnnnnnnnnnnnnnnnnnnnnnnnnnnnnnnnnnnnnnnnnnnnnnnnnnnnnnnnnnnnnnnnnnnnnnnnnnnnnnnnnnnnnnnnnnnnnnnnnnnnnnnnnnnnnnnnnnnnnnnnnnnnnnnnnnnnnnnnnnnnnnnnnnnnnnnnnnnnnnnnnnnnnnnnnnnnnnnnnnnnnnnnnnnnnnnnnnnnnnnnnnnnnnnnnnnnnnnnnnnnnnnnnnnnnnnnnnnnnnnnnnnnnnnnnnnnnnnnnnnnnnnnnnnnnnnnnnnnnnnnnnnnnnnnnnnnnnnnnnnnnnnnnnnnnnnnnnnnnnnnnnnnnnnnnnnnnnnnnnnnnnnnnnnnnnnnnnnnnnnnnnnnnnnnnnnnnnnnnnnnnnnnnnnnnnnnnnnnnnnnnnnnnnnnnnnnnnnnnnnnnnnnnnnnnnnnnnnnnnnnnnnnnnnnnnnnnnnnnnnnnnnnnnnnnnnnnnnnnnnnnnnnnnnnnnnnnnnnnnnnnnnnnnnnnnnnnnnnnnnnnnnnnnnnnnnnnnnnnnnnnnnnnnnnnnnnnnnnnnnnnnnnnnnnnnnnnnnnnnnnnnnnnnnnnnnnnnnnnnnnnnnnnnnnnnnnnnnnnnnnnnnnnnnnnnnnnnnnnnnnnnnnnnnnnnnnnnnnnnnnnnnnnnnnnnnnnnnnnnnnnnnnnnnnnnnnnnnnnnnnnnnnnnnnnnnnnnnnnnnnnnnnnnnnnnnnnnnnnnnnnnnnnnnnnnnnnnnnnnnnnnnnnnnnnnnnnnnnnnnnnnnnnnnnnnnnnnnnnnnnnnnnnnnnnnnnnnnnnnnnnnnnnnnnnnnnnnnnnnnnnnnnnnnnnnnnnnnnnnnnnnnnnnnnnnnnnnnnnnnnnnnnnnnnnnnnnnnnnnnnnnnnnnnnnnnnnnnnnnnnnnnnnnnnnnnnnnnnnnnnnnnnnnnnnnnnnnnnnnnnnnnnnnnnnnnnnnnnnnnnnnnnnnnnnnnnnnnnnnnnnnnnnnnnnnnnnnnnnnnnnnnnnnnnnnnnnnnnnnnnnnnnnnnnnnnnnnnnnnnnnnnnnnnnnnnnnnnnnnnnnnnnnnnnnnnnnnnnnnnnnnnnnnnnnnnnnnnnnnnnnnnnnnnnnnnnnnnnnnnnnnnnnnnnnnnnnnnnnnnnnnnnnnnnnnnnnnnnnnnnnnnnnnnnnnnnnnnnnnnnnnnnnnnnnnnnnnnnnnnnnnnnnnnnnnnnnnnnnnnnnnnnnnnnnnnnnnnnnnnnnnnnnnnnnnnnnnnnnnnnnnnnnnnnnnnnnnnnnnnnnnnnnnnnnnnnnnnnnnnnnnnnnnnnnnnnnnnnnnnnnnnnnnnnnnnnnnnnnnnnnnnnnnnnnnnnnnnnnnnnnnnnnnnnnnnnnnnnnnnnnnnnnnnnnnnnnnnnnnnnnnnnnnnnnnnnnnnnnnnnnnnnnnnnnnnnnnnnnnnnnnnnnnnnnnnnnnnnnnnnnnnnnnnnnnnnnnnnnnnnnnnnnnnnnnnnnnnnnnnnnnnnnnnnnnnnnnnnnnnnnnnnnnnnnnnnnnnnnnnnnnnnnnnnnnnnnnnnnnnnnnnnnnnnnnnnnnnnnnnnnnnnnnnnnnnnnnnnnnnnnnnnnnnnnnnnnnnnnnnnnnnnnnnnnnnnnnnnnnnnnnnnnnnnnnnnnnnnnnnnnnnnnnnnnnnnnnnnnnnnnnnnnnnnnnnnnnnnnnnnnnnnnnnnnnnnnnnnnnnnnnnnnnnnnnnnnnnnnnnnnnnnnnnnnnnnnnnnnnnnnnnnnnnnnnnnnnnnnnnnnnnnnnnnnnnnnnnnnnnnnnnnnnnnnnnnnnnnnnnnnnnnnnnnnnnnnnnnnnnnnnnnnnnnnnnnnnnnnnnnnnnnnnnnnnnnnnnnnnnnnnnnnnnnnnnnnnnnnnnnnnnnnnnnnnnnnnnnnnnnnnnnnnnnnnnnnnnnnnnnnnnnnnnnnnnnnnnnnnnnnnnnnnnnnnnnnnnnnnnnnnnnnnnnnnnnnnnnnnnnnnnnnnnnnnnnnnnnnnnnnnnnnnnnnnnnnnnnnnnnnnnnnnnnnnnnnnnnnnnnnnnnnnnnnnnnnnnnnnnnnnnnnnnnnnnnnnnnnnnnnnnnnnnnnnnnnnnnnnnnnnnnnnnnnnnnnnnnnnnnnnnnnnnnnnnnnnnnnnnnnnnnnnnnnnnnnnnnnnnnnnnnnnnnnnnnnnnnnnnnnnnnnnnnnnnnnnnnnnnnnnnnnnnnnnnnnnnnnnnnnnnnnnnnnnnnnnnnnnnnnnnnnnnnnnnnnnnnnnnnnnnnnnnnnnnnnnnnnnnnnnnnnnnnnnnnnnnnnnnnnnnnnnnnnnnnnnnnnnnnnnnnnnnnnnnnnnnnnnnnnnnnnnnnnnnnnnnnnnnnnnnnnnnnnnnnnnnnnnnnnnnnnnnnnnnnnnnnnnnnnnnnnnnnnnnnnnnnnnnnnnnnnnnnnnnnnnnnnnnnnnnnnnnnnnnnnnnnnnnnnnnnnnnnnnnnnnnnnnnnnnnnnnnnnnnnnnnnnnnnnnnnnnnnnnnnnnnnnnnnnnnnnnnnnnnnnnnnnnnnnnnnnnnnnnnnnnnnnnnnnnnnnnnnnnnnnnnnnnnnnnnnnnnnnnnnnnnnnnnnnnnnnnnnnnnnnnnnnnnnnnnnnnnnnnnnnnnnnnnnnnnnnnnnnnnnnnnnnnnnnnnnnnnnnnnnnnnnnnnnnnnnnnnnnnnnnnnnnnnnnnnnnnnnnnnnnnnnnnnnnnnnnnnnnnnnnnnnnnnnnnnnnnnnnnnnnnnnnnnnnnnnnnnnnnnnnnnnnnnnnnnnnnnnnnnnnnnnnnnnnnnnnnnnnnnnnnnnnnnnnnnnnnnnnnnnnnnnnnnnnnnnnnnnnnnnnnnnnnnnnnnnnnnnnnnnnnnnnnnnnnnnnnnnnnnnnnnnnnnnnnnnnnnnnnnnnnnnnnnnnnnnnnnnnnnnnnnnnnnnnnnnnnnnnnnnnnnnnnnnnnnnnnnnnnnnnnnnnnnnnnnnnnnnnnnnnnnnnnnnnnnnnnnnnnnnnnnnnnnnnnnnnnnnnnnnnnnnnnnnnnnnnnnnnnnnnnnnnnnnnnnnnnnnnnnnnnnnnnnnnnnnnnnnnnnnnnnnnnnnnnnnnnnnnnnnnnnnnnnnnnnnnnnnnnnnnnnnnnnnnnnnnnnnnnnnnnnnnnnnnnnnnnnnnnnnnnnnnnnnnnnnnnnnnnnnnnnnnnnnnnnnnnnnnnnnnnnnnnnnnnnnnnnnnnnnnnnnnnnnnnnnnnnnnnnnnnnnnnnnnnnnnnnnnnnnnnnnnnnnnnnnnnnnnnnnnnnnnnnnnnnnnnnnnnnnnnnnnnnnnnnnnnnnnnnnnnnnnnnnnnnnnnnnnnnnnnnnnnnnnnnnnnnnnnnnnnnnnnnnnnnnnnnnnnnnnnnnnnnnnnnnnnnnnnnnnnnnnnnnnnnnnnnnnnnnnnnnnnnnnnnnnnnnnnnnnnnnnnnnnnnnnnnnnnnnnnnnnnnnnnnnnnnnnnnnnnnnnnnnnnnnnnnnnnnnnnnnnnnnnnnnnnnnnnnnnnnnnnnnnnnnnnnnnnnnnnnnnnnnnnnnnnnnnnnnnnnnnnnnnnnnnnnnnnnnnnnnnnnnnnnnnnnnnnnnnnnnnnnnnnnnnnnnnnnnnnnnnnnnnnnnnnnnnnnnnnnnnnnnnnnnnnnnnnnnnnnnnnnnnnnnnnnnnnnnnnnnnnnnnnnnnnnnnnnnnnnnnnnnnnnnnnnnnnnnnnnnnnnnnnnnnnnnnnnnnnnnnnnnnnnnnnnnnnnnnnnnnnnnnnnnnnnnnnnnnnnnnnnnnnnnnnnnnnnnnnnnnnnnnnnnnnnnnnnnnnnnnnnnnnnnnnnnnnnnnnnnnnnnnnnnnnnnnnnnnnnnnnnnnnnnnnnnnnnnnnnnnnnnnnnnnnnnnnnnnnnnnnnnnnnnnnnnnnnnnnnnnnnnnnnnnnnnnnnnnnnnnnnnnnnnnnnnnnnnnnnnnnnnnnnnnnnnnnnnnnnnnnnnnnnnnnnnnnnnnnnnnnnnnnnnnnnnnnnnnnnnnnnnnnnnnnnnnnnnnnnnnnnnnnnnnnnnnnnnnnnnnnnnnnnnnnnnnnnnnnnnnnnnnnnnnnnnnnnnnnnnnnnnnnnnnnnnnnnnnnnnnnnnnnnnnnnnnnnnnnnnnnnnnnnnnnnnnnnnnnnnnnnnnnnnnnnnnnnnnnnnnnnnnnnnnnnnnnnnnnnnnnnnnnnnnnnnnnnnnnnnnnnnnnnnnnnnnnnnnnnnnnnnnnnnnnnnnnnnnnnnnnnnnnnnnnnnnnnnnnnnnnnnnnnnnnnnnnnnnnnnnnnnnnnnnnnnnnnnnnnnnnnnnnnnnnnnnnnnnnnnnnnnnnnnnnnnnnnnnnnnnnnnnnnnnnnnnnnnnnnnnnnnnnnnnnnnnnnnnnnnnnnnnnnnnnnnnnnnnnnnnnnnnnnnnnnnnnnnnnnnnnnnnnnnnnnnnnnnnnnnnnnnnnnnnnnnnnnnnnnnnnnnnnnnnnnnnnnnnnnnnnnnnnnnnnnnnnnnnnnnnnnnnnnnnnnnnnnnnnnnnnnnnnnnnnnnnnnnnnnnnnnnnnnnnnnnnnnnnnnnnnnnnnnnnnnnnnnnnnnnnnnnnnnnnnnnnnnnnnnnnnnnnnnnnnnnnnnnnnnnnnnnnnnnnnnnnnnnnnnnnnnnnnnnnnnnnnnnnnnnnnnnnnnnnnnnnnnnnnnnnnnnnnnnnnnnnnnnnnnnnnnnnnnnnnnnnnnnnnnnnnnnnnnnnnnnnnnnnnnnnnnnnnnnnnnnnnnnnnnnnnnnnnnnnnnnnnnnnnnnnnnnnnnnnnnnnnnnnnnnnnnnnnnnnnnnnnnnnnnnnnnnnnnnnnnnnnnnnnnnnnnnnnnnnnnnnnnnnnnnnnnnnnnnnnnnnnnnnnnnnnnnnnnnnnnnnnnnnnnnnnnnnnnnnnnnnnnnnnnnnnnnnnnnnnnnnnnnnnnnnnnnnnnnnnnnnnnnnnnnnnnnnnnnnnnnnnnnnnnnnnnnnnnnnnnnnnnnnnnnnnnnnnnnnnnnnnnnnnnnnnnnnnnnnnnnnnnnnnnnnnnnnnnnnnnnnnnnnnnnnnnnnnnnnnnnnnnnnnnnnnnnnnnnnnnnnnnnnnnnnnnnnnnnnnnnnnnnnnnnnnnnnnnnnnnnnnnnnnnnnnnnnnnnnnnnnnnnnnnnnnnnnnnnnnnnnnnnnnnnnnnnnnnnnnnnnnnnnnnnnnnnnnnnnnnnnnnnnnnnnnnnnnnnnnnnnnnnnnnnnnnnnnnnnnnnnnnnnnnnnnnnnnnnnnnnnnnnnnnnnnnnnnnnnnnnnnnnnnnnnnnnnnnnnnnnnnnnnnnnnnnnnnnnnnnnnnnnnnnnnnnnnnnnnnnnnnnnnnnnnnnnnnnnnnnnnnnnnnnnnnnnnnnnnnnnnnnnnnnnnnnnnnnnnnnnnnnnnnnnnnnnnnnnnnnnnnnnnnnnnnnnnnnnnnnnnnnnnnnnnnnnnnnnnnnnnnnnnnnnnnnnnnnnnnnnnnnnnnnnnnnnnnnnnnnnnnnnnnnnnnnnnnnnnnnnnnnnnnnnnnnnnnnnnnnnnnnnnnnnnnnnnnnnnnnnnnnnnnnnnnnnnnnnnnnnnnnnnnnnnnnnnnnnnnnnnnnnnnnnnnnnnnnnnnnnnnnnnnnnnnnnnnnnnnnnnnnnnnnnnnnnnnnnnnnnnnnnnnnnnnnnnnnnnnnnnnnnnnnnnnnnnnnnnnnnnnnnnnnnnnnnnnnnnnnnnnnnnnnnnnnnnnnnnnnnnnnnnnnnnnnnnnnnnnnnnnnnnnnnnnnnnnnnnnnnnnnnnnnnnnnnnnnnnnnnnnnnnnnnnnnnnnnnnnnnnnnnnnnnnnnnnnnnnnnnnnnnnnnnnnnnnnnnnnnnnnnnnnnnnnnnnnnnnnnnnnnnnnnnnnnnnnnnnnnnnnnnnnnnnnnnnnnnnnnnnnnnnnnnnnnnnnnnnnnnnnnnnnnnnnnnnnnnnnnnnnnnnnnnnnnnnnnnnnnnnnnnnnnnnnnnnnnnnnnnnnnnnnnnnnnnnnnnnnnnnnnnnnnnnnnnnnnnnnnnnnnnnnnnnnnnnnnnnnnnnnnnnnnnnnnnnnnnnnnnnnnnnnnnnnnnnnnnnnnnnnnnnnnnnnnnnnnnnnnnnnnnnnnnnnnnnnnnnnnnnnnnnnnnnnnnnnnnnnnnnnnnnnnnnnnnnnnnnnnnnnnnnnnnnnnnnnnnnnnnnnnnnnnnnnnnnnnnnnnnnnnnnnnnnnnnnnnnnnnnnnnnnnnnnnnnnnnnnnnnnnnnnnnnnnnnnnnnnnnnnnnnnnnnnnnnnnnnnnnnnnnnnnnnnnnnnnnnnnnnnnnnnnnnnnnnnnnnnnnnnnnnnnnnnnnnnnnnnnnnnnnnnnnnnnnnnnnnnnnnnnnnnnnnnnnnnnnnnnnnnnnnnnnnnnnnnnnnnnnnnnnnnnnnnnnnnnnnnnnnnnnnnnnnnnnnnnnnnnnnnnnnnnnnnnnnnnnnnnnnnnnnnnnnnnnnnnnnnnnnnnnnnnnnnnnnnnnnnnnnnnnnnnnnnnnnnnnnnnnnnnnnnnnnnnnnnnnnnnnnnnnnnnnnnnnnnnnnnnnnnnnnnnnnnnnnnnnnnnnnnnnnnnnnnnnnnnnnnnnnnnnnnnnnnnnnnnnnnnnnnnnnnnnnnnnnnnnnnnnnnnnnnnnnnnnnnnnnnnnnnnnnnnnnnnnnnnnnnnnnnnnnnnnnnnnnnnnnnnnnnnnnnnnnnnnnnnnnnnnnnnnnnnnnnnnnnnnnnnnnnnnnnnnnnnnnnnnnnnnnnnnnnnnnnnnnnnnnnnnnnnnnnnnnnnnnnnnnnnnnnnnnnnnnnnnnnnnnnnnnnnnnnnnnnnnnnnnnnnnnnnnnnnnnnnnnnnnnnnnnnnnnnnnnnnnnnnnnnnnnnnnnnnnnnnnnnnnnnnnnnnnnnnnnnnnnnnnnnnnnnnnnnnnnnnnnnnnnnnnnnnnnnnnnnnnnnnnnnnnnnnnnnnnnnnnnnnnnnnnnnnnnnnnnnnnnnnnnnnnnnnnnnnnnnnnnnnnnnnnnnnnnnnnnnnnnnnnnnnnnnnnnnnnnnnnnnnnnnnnnnnnnnnnnnnnnnnnnnnnnnnnnnnnnnnnnnnnnnnnnnnnnnnnnnnnnnnnnnnnnnnnnnnnnnnnnnnnnnnnnnnnnnnnnnnnnnnnnnnnnnnnnnnnnnnnnnnnnnnnnnnnnnnnnnnnnnnnnnnnnnnnnnnnnnnnnnnnnnnnnnnnnnnnnnnnnnnnnnnnnnnnnnnnnnnnnnnnnnnnnnnnnnnnnnnnnnnnnnnnnnnnnnnnnnnnnnnnnnnnnnnnnnnnnnnnnnnnnnnnnnnnnnnnnnnnnnnnnnnnnnnnnnnnnnnnnnnnnnnnnnnnnnnnnnnnnnnnnnnnnnnnnnnnnnnnnnnnnnnnnnnnnnnnnnnnnnnnnnnnnnnnnnnnnnnnnnnnnnnnnnnnnnnnnnnnnnnnnnnnnnnnnnnnnnnnnnnnnnnnnnnnnnnnnnnnnnnnnnnnnnnnnnnnnnnnnnnnnnnnnnnnnnnnnnnnnnnnnnnnnnnnnnnnnnnnnnnnnnnnnnnnnnnnnnnnnnnnnnnnnnnnnnnnnnnnnnnnnnnnnnnnnnnnnnnnnnnnnnnnnnnnnnnnnnnnnnnnnnnnnnnnnnnnnnnnnnnnnnnnnnnnnnnnnnnnnnnnnnnnnnnnnnnnnnnnnnnnnnnnnnnnnnnnnnnnnnnnnnnnnnnnnnnnnnnnnnnnnnnnnnnnnnnnnnnnnnnnnnnnnnnnnnnnnnnnnnnnnnnnnnnnnnnnnnnnnnnnnnnnnnnnnnnnnnnnnnnnnnnnnnnnnnnnnnnnnnnnnnnnnnnnnnnnnnnnnnnnnnnnnnnnnnnnnnnnnnnnnnnnnnnnnnnnnnnnnnnnnnnnnnnnnnnnnnnnnnnnnnnnnnnnnnnnnnnnnnnnnnnnnnnnnnnnnnnnnnnnnnnnnnnnnnnnnnnnnnnnnnnnnnnnnnnnnnnnnnnnnnnnnnnnnnnnnnnnnnnnnnnnnnnnnnnnnnnnnnnnnnnnnnnnnnnnnnnnnnnnnnnnnnnnnnnnnnnnnnnnnnnnnnnnnnnnnnnnnnnnnnnnnnnnnnnnnnnnnnnnnnnnnnnnnnnnnnnnnnnnnnnnnnnnnnnnnnnnnnnnnnnnnnnnnnnnnnnnnnnnnnnnnnnnnnnnnnnnnnnnnnnnnnnnnnnnnnnnnnnnnnnnnnnnnnnnnnnnnnnnnnnnnnnnnnnnnnnnnnnnnnnnnnnnnnnnnnnnnnnnnnnnnnnnnnnnnnnnnnnnnnnnnnnnnnnnnnnnnnnnnnnnnnnnnnnnnnnnnnnnnnnnnnnnnnnnnnnnnnnnnnnnnnnnnnnnnnnnnnnnnnnnnnnnnnnnnnnnnnnnnnnnnnnnnnnnnnnnnnnnnnnnnnnnnnnnnnnnnnnnnnnnnnnnnnnnnnnnnnnnnnnnnnnnnnnnnnnnnnnnnnnnnnnnnnnnnnnnnnnnnnnnnnnnnnnnnnnnnnnnnnnnnnnnnnnnnnnnnnnnnnnnnnnnnnnnnnnnnnnnnnnnnnnnnnnnnnnnnnnnnnnnnnnnnnnnnnnnnnnnnnnnnnnnnnnnnnnnnnnnnnnnnnnnnnnnnnnnnnnnnnnnnnnnnnnnnnnnnnnnnnnnnnnnnnnnnnnnnnnnnnnnnnnnnnnnnnnnnnnnnnnnnnnnnnnnnnnnnnnnnnnnnnnnnnnnnnnnnnnnnnnnnnnnnnnnnnnnnnnnnnnnnnnnnnnnnnnnnnnnnnnnnnnnnnnnnnnnnnnnnnnnnnnnnnnnnnnnnnnnnnnnnnnnnnnnnnnnnnnnnnnnnnnnnnnnnnnnnnnnnnnnnnnnnnnnnnnnnnnnnnnnnnnnnnnnnnnnnnnnnnnnnnnnnnnnnnnnnnnnnnnnnnnnnnnnnnnnnnnnnnnnnnnnnnnnnnnnnnnnnnnnnnnnnnnnnnnnnnnnnnnnnnnnnnnnnnnnnnnnnnnnnnnnnnnnnnnnnnnnnnnnnnnnnnnnnnnnnnnnnnnnnnnnnnnnnnnnnnnnnnnnnnnnnnnnnnnnnnnnnnnnnnnnnnnnnnnnnnnnnnnnnnnnnnnnnnnnnnnnnnnnnnnnnnnnnnnnnnnnnnnnnnnnnnnnnnnnnnnnnnnnnnnnnnnnnnnnnnnnnnnnnnnnnnnnnnnnnnnnnnnnnnnnnnnnnnnnnnnnnnnnnnnnnnnnnnnnnnnnnnnnnnnnnnnnnnnnnnnnnnnnnnnnnnnnnnnnnnnnnnnnnnnnnnnnnnnnnnnnnnnnnnnnnnnnnnnnnnnnnnnnnnnnnnnnnnnnnnnnnnnnnnnnnnnnnnnnnnnnnnnnnnnnnnnnnnnnnnnnnnnnnnnnnnnnnnnnnnnnnnnnnnnnnnnnnnnnnnnnnnnnnnnnnnnnnnnnnnnnnnnnnnnnnnnnnnnnnnnnnnnnnnnnnnnnnnnnnnnnnnnnnnnnnnnnnnnnnnnnnnnnnnnnnnnnnnnnnnnnnnnnnnnnnnnnnnnnnnnnnnnnnnnnnnnnnnnnnnnnnnnnnnnnnnnnnnnnnnnnnnnnnnnnnnnnnnnnnnnnnnnnnnnnnnnnnnnnnnnnnnnnnnnnnnnnnnnnnnnnnnnnnnnnnnnnnnnnnnnnnnnnnnnnnnnnnnnnnnnnnnnnnnnnnnnnnnnnnnnnnnnnnnnnnnnnnnnnnnnnnnnnnnnnnnnnnnnnnnnnnnnnnnnnnnnnnnnnnnnnnnnnnnnnnnnnnnnnnnnnnnnnnnnnnnnnnnnnnnnnnnnnnnnnnnnnnnnnnnnnnnnnnnnnnnnnnnnnnnnnnnnnnnnnnnnnnnnnnnnnnnnnnnnnnnnnnnnnnnnnnnnnnnnnnnnnnnnnnnnnnnnnnnnnnnnnnnnnnnnnnnnnnnnnnnnnnnnnnnnnnnnnnnnnnnnnnnnnnnnnnnnnnnnnnnnnnnnnnnnnnnnnnnnnnnnnnnnnnnnnnnnnnnnnnnnnnnnnnnnnnnnnnnnnnnnnnnnnnnnnnnnnnnnnnnnnnnnnnnnnnnnnnnnnnnnnnnnnnnnnnnnnnnnnnnnnnnnnnnnnnnnnnnnnnnnnnnnnnnnnnnnnnnnnnnnnnnnnnnnnnnnnnnnnnnnnnnnnnnnnnnnnnnnnnnnnnnnnnnnnnnnnnnnnnnnnnnnnnnnnnnnnnnnnnnnnnnnnnnnnnnnnnnnnnnnnnnnnnnnnnnnnnnnnnnnnnnnnnnnnnnnnnnnnnnnnnnnnnnnnnnnnnnnnnnnnnnnnnnnnnnnnnnnnnnnnnnnnnnnnnnnnnnnnnnnnnnnnnnnnnnnnnnnnnnnnnnnnnnnnnnnnnnnnnnnnnnnnnnnnnnnnnnnnnnnnnnnnnnnnnnnnnnnnnnnnnnnnnnnnnnnnnnnnnnnnnnnnnnnnnnnnnnnnnnnnnnnnnnnnnnnnnnnnnnnnnnnnnnnnnnnnnnnnnnnnnnnnnnnnnnnnnnnnnnnnnnnnnnnnnnnnnnnnnnnnnnnnnnnnnnnnnnnnnnnnnnnnnnnnnnnnnnnnnnnnnnnnnnnnnnnnnnnnnnnnnnnnnnnnnnnnnnnnnnnnnnnnnnnnnnnnnnnnnnnnnnnnnnnnnnnnnnnnnnnnnnnnnnnnnnnnnnnnnnnnnnnnnnnnnnnnnnnnnnnnnnnnnnnnnnnnnnnnnnnnnnnnnnnnnnnnnnnnnnnnnnnnnnnnnnnnnnnnnnnnnnnnnnnnnnnnnnnnnnnnnnnnnnnnnnnnnnnnnnnnnnnnnnnnnnnnnnnnnnnnnnnnnnnnnnnnnnnnnnnnnnnnnnnnnnnnnnnnnnnnnnnnnnnnnnnnnnnnnnnnnnnnnnnnnnnnnnnnnnnnnnnnnnnnnnnnnnnnnnnnnnnnnnnnnnnnnnnnnnnnnnnnnnnnnnnnnnnnnnnnnnnnnnnnnnnnnnnnnnnnnnnnnnnnnnnnnnnnnnnnnnnnnnnnnnnnnnnnnnnnnnnnnnnnnnnnnnnnnnnnnnnnnnnnnnnnnnnnnnnnnnnnnnnnnnnnnnnnnnnnnnnnnnnnnnnnnnnnnnnnnnnnnnnnnnnnnnnnnnnnnnnnnnnnnnnnnnnnnnnnnnnnnnnnnnnnnnnnnnnnnnnnnnnnnnnnnnnnnnnnnnnnnnnnnnnnnnnnnnnnnnnnnnnnnnnnnnnnnnnnnnnnnnnnnnnnnnnnnnnnnnnnnnnnnnnnnnnnnnnnnnnnnnnnnnnnnnnnnnnnnnnnnnnnnnnnnnnnnnnnnnnnnnnnnnnnnnnnnnnnnnnnnnnnnnnnnnnnnnnnnnnnnnnnnnnnnnnnnnnnnnnnnnnnnnnnnnnnnnnnnnnnnnnnnnnnnnnnnnnnnnnnnnnnnnnnnnnnnnnnnnnnnnnnnnnnnnnnnnnnnnnnnnnnnnnnnnnnnnnnnnnnnnnnnnnnnnnnnnnnnnnnnnnnnnnnnnnnnnnnnnnnnnnnnnnnnnnnnnnnnnnnnnnnnnnnnnnnnnnnnnnnnnnnnnnnnnnnnnnnnnnnnnnnnnnnnnnnnnnnnnnnnnnnnnnnnnnnnnnnnnnnnnnnnnnnnnnnnnnnnnnnnnnnnnnnnnnnnnnnnnnnnnnnnnnnnnnnnnnnnnnnnnnnnnnnnnnnnnnnnnnnnnnnnnnnnnnnnnnnnnnnnnnnnnnnnnnnnnnnnnnnnnnnnnnnnnnnnnnnnnnnnnnnnnnnnnnnnnnnnnnnnnnnnnnnnnnnnnnnnnnnnnnnnnnnnnnnnnnnnnnnnnnnnnnnnnnnnnnnnnnnnnnnnnnnnnnnnnnnnnnnnnnnnnnnnnnnnnnnnnnnnnnnnnnnnnnnnnnnnnnnnnnnnnnnnnnnnnnnnnnnnnnnnnnnnnnnnnnnnnnnnnnnnnnnnnnnnnnnnnnnnnnnnnnnnnnnnnnnnnnnnnnnnnnnnnnnnnnnnnnnnnnnnnnnnnnnnnnnnnnnnnnnnnnnnnnnnnnnnnnnnnnnnnnnnnnnnnnnnnnnnnnnnnnnnnnnnnnnnnnnnnnnnnnnnnnnnnnnnnnnnnnnnnnnnnnnnnnnnnnnnnnnnnnnnnnnnnnnnnnnnnnnnnnnnnnnnnnnnnnnnnnnnnnnnnnnnnnnnnnnnnnnnnnnnnnnnnnnnnnnnnnnnnnnnnnnnnnnnnnnnnnnnnnnnnnnnnnnnnnnnnnnnnnnnnnnnnnnnnnnnnnnnnnnnnnnnnnnnnnnnnnnnnnnnnnnnnnnnnnnnnnnnnnnnnnnnnnnnnnnnnnnnnnnnnnnnnnnnnnnnnnnnnnnnnnnnnnnnnnnnnnnnnnnnnnnnnnnnnnnnnnnnnnnnnnnnnnnnnnnnnnnnnnnnnnnnnnnnnnnnnnnnnnnnnnnnnnnnnnnnnnnnnnnnnnnnnnnnnnnnnnnnnnnnnnnnnnnnnnnnnnnnnnnnnnnnnnnnnnnnnnnnnnnnnnnnnnnnnnnnnnnnnnnnnnnnnnnnnnnnnnnnnnnnnnnnnnnnnnnnnnnnnnnnnnnnnnnnnnnnnnnnnnnnnnnnnnnnnnnnnnnnnnnnnnnnnnnnnnnnnnnnnnnnnnnnnnnnnnnnnnnnnnnnnnnnnnnnnnnnnnnnnnnnnnnnnnnnnnnnnnnnnnnnnnnnnnnnnnnnnnnnnnnnnnnnnnnnnnnnnnnnnnnnnnnnnnnnnnnnnnnnnnnnnnnnnnnnnnnnnnnnnnnnnnnnnnnnnnnnnnnnnnnnnnnnnnnnnnnnnnnnnnnnnnnnnnnnnnnnnnnnnnnnnnnnnnnnnnnnnnnnnnnnnnnnnnnnnnnnnnnnnnnnnnnnnnnnnnnnnnnnnnnnnnnnnnnnnnnnnnnnnnnnnnnnnnnnnnnnnnnnnnnnnnnnnnnnnnnnnnnnnnnnnnnnnnnnnnnnnnnnnnnnnnnnnnnnnnnnnnnnnnnnnnnnnnnnnnnnnnnnnnnnnnnnnnnnnnnnnnnnnnnnnnnnnnnnnnnnnnnnnnnnnnnnnnnnnnnnnnnnnnnnnnnnnnnnnnnnnnnnnnnnnnnnnnnnnnnnnnnnnnnnnnnnnnnnnnnnnnnnnnnnnnnnnnnnnnnnnnnnnnnnnnnnnnnnnnnnnnnnnnnnnnnnnnnnnnnnnnnnnnnnnnnnnnnnnnnnnnnnnnnnnnnnnnnnnnnnnnnnnnnnnnnnnnnnnnnnnnnnnnnnnnnnnnnnnnnnnnnnnnnnnnnnnnnnnnnnnnnnnnnnnnnnnnnnnnnnnnnnnnnnnnnnnnnnnnnnnnnnnnnnnnnnnnnnnnnnnnnnnnnnnnnnnnnnnnnnnnnnnnnnnnnnnnnnnnnnnnnnnnnnnnnnnnnnnnnnnnnnnnnnnnnnnnnnnnnnnnnnnnnnnnnnnnnnnnnnnnnnnnnnnnnnnnnnnnnnnnnnnnnnnnnnnnnnnnnnnnnnnnnnnnnnnnnnnnnnnnnnnnnnnnnnnnnnnnnnnnnnnnnnnnnnnnnnnnnnnnnnnnnnnnnnnnnnnnnnnnnnnnnnnnnnnnnnnnnnnnnnnnnnnnnnnnnnnnnnnnnnnnnnnnnnnnnnnnnnnnnnnnnnnnnnnnnnnnnnnnnnnnnnnnnnnnnnnnnnnnnnnnnnnnnnnnnnnnnnnnnnnnnnnnnnnnnnnnnnnnnnnnnnnnnnnnnnnnnnnnnnnnnnnnnnnnnnnnnnnnnnnnnnnnnnnnnnnnnnnnnnnnnnnnnnnnnnnnnnnnnnnnnnnnnnnnnnnnnnnnnnnnnnnnnnnnnnnnnnnnnnnnnnnnnnnnnnnnnnnnnnnnnnnnnnnnnnnnnnnnnnnnnnnnnnnnnnnnnnnnnnnnnnnnnnnnnnnnnnnnnnnnnnnnnnnnnnnnnnnnnnnnnnnnnnnnnnnnnnnnnnnnnnnnnnnnnnnnnnnnnnnnnnnnnnnnnnnnnnnnnnnnnnnnnnnnnnnnnnnnnnnnnnnnnnnnnnnnnnnnnnnnnnnnnnnnnnnnnnnnnnnnnnnnnnnnnnnnnnnnnnnnnnnnnnnnnnnnnnnnnnnnnnnnnnnnnnnnnnnnnnnnnnnnnnnnnnnnnnnnnnnnnnnnnnnnnnnnnnnnnnnnnnnnnnnnnnnnnnnnnnnnnnnnnnnnnnnnnnnnnnnnnnnnnnnnnnnnnnnnnnnnnnnnnnnnnnnnnnnnnnnnnnnnnnnnnnnnnnnnnnnnnnnnnnnnnnnnnnnnnnnnnnnnnnnnnnnnnnnnnnnnnnnnnnnnnnnnnnnnnnnnnnnnnnnnnnnnnnnnnnnnnnnnnnnnnnnnnnnnnnnnnnnnnnnnnnnnnnnnnnnnnnnnnnnnnnnnnnnnnnnnnnnnnnnnnnnnnnnnnnnnnnnnnnnnnnnnnnnnnnnnnnnnnnnnnnnnnnnnnnnnnnnnnnnnnnnnnnnnnnnnnnnnnnnnnnnnnnnnnnnnnnnnnnnnnnnnnnnnnnnnnnnnnnnnnnnnnnnnnnnnnnnnnnnnnnnnnnnnnnnnnnnnnnnnnnnnnnnnnnnnnnnnnnnnnnnnnnnnnnnnnnnnnnnnnnnnnnnnnnnnnnnnnnnnnnnnnnnnnnnnnnnnnnnnnnnnnnnnnnnnnnnnnnnnnnnnnnnnnnnnnnnnnnnnnnnnnnnnnnnnnnnnnnnnnnnnnnnnnnnnnnnnnnnnnnnnnnnnnnnnnnnnnnnnnnnnnnnnnnnnnnnnnnnnnnnnnnnnnnnnnnnnnnnnnnnnnnnnnnnnnnnnnnnnnnnnnnnnnnnnnnnnnnnnnnnnnnnnnnnnnnnnnnnnnnnnnnnnnnnnnnnnnnnnnnnnnnnnnnnnnnnnnnnnnnnnnnnnnnnnnnnnnnnnnnnnnnnnnnnnnnnnnnnnnnnnnnnnnnnnnnnnnnnnnnnnnnnnnnnnnnnnnnnnnnnnnnnnnnnnnnnnnnnnnnnnnnnnnnnnnnnnnnnnnnnnnnnnnnnnnnnnnnnnnnnnnnnnnnnnnnnnnnnnnnnnnnnnnnnnnnnnnnnnnnnnnnnnnnnnnnnnnnnnnnnnnnnnnnnnnnnnnnnnnnnnnnnnnnnnnnnnnnnnnnnnnnnnnnnnnnnnnnnnnnnnnnnnnnnnnnnnnnnnnnnnnnnnnnnnnnnnnnnnnnnnnnnnnnnnnnnnnnnnnnnnnnnnnnnnnnnnnnnnnnnnnnnnnnnnnnnnnnnnnnnnnnnnnnnnnnnnnnnnnnnnnnnnnnnnnnnnnnnnnnnnnnnnnnnnnnnnnnnnnnnnnnnnnnnnnnnnnnnnnnnnnnnnnnnnnnnnnnnnnnnnnnnnnnnnnnnnnnnnnnnnnnnnnnnnnnnnnnnnnnnnnnnnnnnnnnnnnnnnnnnnnnnnnnnnnnnnnnnnnnnnnnnnnnnnnnnnnnnnnnnnnnnnnnnnnnnnnnnnnnnnnnnnnnnnnnnnnnnnnnnnnnnnnnnnnnnnnnnnnnnnnnnnnnnnnnnnnnnnnnnnnnnnnnnnnnnnnnnnnnnnnnnnnnnnnnnnnnnnnnnnnnnnnnnnnnnnnnnnnnnnnnnnnnnnnnnnnnnnnnnnnnnnnnnnnnnnnnnnnnnnnnnnnnnnnnnnnnnnnnnnnnnnnnnnnnnnnnnnnnnnnnnnnnnnnnnnnnnnnnnnnnnnnnnnnnnnnnnnnnnnnnnnnnnnnnnnnnnnnnnnnnnnnnnnnnnnnnnnnnnnnnnnnnnnnnnnnnnnnnnnnnnnnnnnnnnnnnnnnnnnnnnnnnnnnnnnnnnnnnnnnnnnnnnnnnnnnnnnnnnnnnnnnnnnnnnnnnnnnnnnnnnnnnnnnnnnnnnnnnnnnnnnnnnnnnnnnnnnnnnnnnnnnnnnnnnnnnnnnnnnnnnnnnnnnnnnnnnnnnnnnnnnnnnnnnnnnnnnnnnnnnnnnnnnnnnnnnnnnnnnnnnnnnnnnnnnnnnnnnnnnnnnnnnnnnnnnnnnnnnnnnnnnnnnnnnnnnnnnnnnnnnnnnnnnnnnnnnnnnnnnnnnnnnnnnnnnnnnnnnnnnnnnnnnnnnnnnnnnnnnnnnnnnnnnnnnnnnnnnnnnnnnnnnnnnnnnnnnnnnnnnnnnnnnnnnnnnnnnnnnnnnnnnnnnnnnnnnnnnnnnnnnnnnnnnnnnnnnnnnnnnnnnnnnnnnnnnnnnnnnnnnnnnnnnnnnnnnnnnnnnnnnnnnnnnnnnnnnnnnnnnnnnnnnnnnnnnnnnnnnnnnnnnnnnnnnnnnnnnnnnnnnnnnnnnnnnnnnnnnnnnnnnnnnnnnnnnnnnnnnnnnnnnnnnnnnnnnnnnnnnnnnnnnnnnnnnnnnnnnnnnnnnnnnnnnnnnnnnnnnnnnnnnnnnnnnnnnnnnnnnnnnnnnnnnnnnnnnnnnnnnnnnnnnnnnnnnnnnnnnnnnnnnnnnnnnnnnnnnnnnnnnnnnnnnnnnnnnnnnnnnnnnnnnnnnnnnnnnnnnnnnnnnnnnnnnnnnnnnnnnnnnnnnnnnnnnnnnnnnnnnnnnnnnnnnnnnnnnnnnnnnnnnnnnnnnnnnnnnnnnnnnnnnnnnnnnnnnnnnnnnnnnnnnnnnnnnnnnnnnnnnnnnnnnnnnnnnnnnnnnnnnnnnnnnnnnnnnnnnnnnnnnnnnnnnnnnnnnnnnnnnnnnnnnnnnnnnnnnnnnnnnnnnnnnnnnnnnnnnnnnnnnnnnnnnnnnnnnnnnnnnnnnnnnnnnnnnnnnnnnnnnnnnnnnnnnnnnnnnnnnnnnnnnnnnnnnnnnnnnnnnnnnnnnnnnnnnnnnnnnnnnnnnnnnnnnnnnnnnnnnnnnnnnnnnnnnnnnnnnnnnnnnnnnnnnnnnnnnnnnnnnnnnnnnnnnnnnnnnnnnnnnnnnnnnnnnnnnnnnnnnnnnnnnnnnnnnnnnnnnnnnnnnnnnnnnnnnnnnnnnnnnnnnnnnnnnnnnnnnnnnnnnnnnnnnnnnnnnnnnnnnnnnnnnnnnnnnnnnnnnnnnnnnnnnnnnnnnnnnnnnnnnnnnnnnnnnnnnnnnnnnnnnnnnnnnnnnnnnnnnnnnnnnnnnnnnnnnnnnnnnnnnnnnnnnnnnnnnnnnnnnnnnnnnnnnnnnnnnnnnnnnnnnnnnnnnnnnnnnnnnnnnnnnnnnnnnnnnnnnnnnnnnnnnnnnnnnnnnnnnnnnnnnnnnnnnnnnnnnnnnnnnnnnnnnnnnnnnnnnnnnnnnnnnnnnnnnnnnnnnnnnnnnnnnnnnnnnnnnnnnnnnnnnnnnnnnnnnnnnnnnnnnnnnnnnnnnnnnnnnnnnnnnnnnnnnnnnnnnnnnnnnnnnnnnnnnnnnnnnnnnnnnnnnnnnnnnnnnnnnnnnnnnnnnnnnnnnnnnnnnnnnnnnnnnnnnnnnnnnnnnnnnnnnnnnnnnnnnnnnnnnnnnnnnnnnnnnnnnnnnnnnnnnnnnnnnnnnnnnnnnnnnnnnnnnnnnnnnnnnnnnnnnnnnnnnnnnnnnnnnnnnnnnnnnnnnnnnnnnnnnnnnnnnnnnnnnnnnnnnnnnnnnnnnnnnnnnnnnnnnnnnnnnnnnnnnnnnnnnnnnnnnnnnnnnnnnnnnnnnnnnnnnnnnnnnnnnnnnnnnnnnnnnnnnnnnnnnnnnnnnnnnnnnnnnnnnnnnnnnnnnnnnnnnnnnnnnnnnnnnnnnnnnnnnnnnnnnnnnnnnnnnnnnnnnnnnnnnnnnnnnnnnnnnnnnnnnnnnnnnnnnnnnnnnnnnnnnnnnnnnnnnnnnnnnnnnnnnnnnnnnnnnnnnnnnnnnnnnnnnnnnnnnnnnnnnnnnnnnnnnnnnnnnnnnnnnnnnnnnnnnnnnnnnnnnnnnnnnnnnnnnnnnnnnnnnnnnnnnnnnnnnnnnnnnnnnnnnnnnnnnnnnnnnnnnnnnnnnnnnnnnnnnnnnnnnnnnnnnnnnnnnnnnnnnnnnnnnnnnnnnnnnnnnnnnnnnnnnnnnnnnnnnnnnnnnnnnnnnnnnnnnnnnnnnnnnnnnnnnnnnnnnnnnnnnnnnnnnnnnnnnnnnnnnnnnnnnnnnnnnnnnnnnnnnnnnnnnnnnnnnnnnnnnnnnnnnnnnnnnnnnnnnnnnnnnnnnnnnnnnnnnnnnnnnnnnnnnnnnnnnnnnnnnnnnnnnnnnnnnnnnnnnnnnnnnnnnnnnnnnnnnnnnnnnnnnnnnnnnnnnnnnnnnnnnnnnnnnnnnnnnnnnnnnnnnnnnnnnnnnnnnnnnnnnnnnnnnnnnnnnnnnnnnnnnnnnnnnnnnnnnnnnnnnnnnnnnnnnnnnnnnnnnnnnnnnnnnnnnnnnnnnnnnnnnnnnnnnnnnnnnnnnnnnnnnnnnnnnnnnnnnnnnnnnnnnnnnnnnnnnnnnnnnnnnnnnnnnnnnnnnnnnnnnnnnnnnnnnnnnnnnnnnnnnnnnnnnnnnnnnnnnnnnnnnnnnnnnnnnnnnnnnnnnnnnnnnnnnnnnnnnnnnnnnnnnnnnnnnnnnnnnnnnnnnnnnnnnnnnnnnnnnnnnnnnnnnnnnnnnnnnnnnnnnnnnnnnnnnnnnnnnnnnnnnnnnnnnnnnnnnnnnnnnnnnnnnnnnnnnnnnnnnnnnnnnnnnnnnnnnnnnnnnnnnnnnnnnnnnnnnnnnnnnnnnnnnnnnnnnnnnnnnnnnnnnnnnnnnnnnnnnnnnnnnnnnnnnnnnnnnnnnnnnnnnnnnnnnnnnnnnnnnnnnnnnnnnnnnnnnnnnnnnnnnnnnnnnnnnnnnnnnnnnnnnnnnnnnnnnnnnnnnnnnnnnnnnnnnnnnnnnnnnnnnnnnnnnnnnnnnnnnnnnnnnnnnnnnnnnnnnnnnnnnnnnnnnnnnnnnnnnnnnnnnnnnnnnnnnnnnnnnnnnnnnnnnnnnnnnnnnnnnnnnnnnnnnnnnnnnnnnnnnnnnnnnnnnnnnnnnnnnnnnnnnnnnnnnnnnnnnnnnnnnnnnnnnnnnnnnnnnnnnnnnnnnnnnnnnnnnnnnnnnnnnnnnnnnnnnnnnnnnnnnnnnnnnnnnnnnnnnnnnnnnnnnnnnnnnnnnnnnnnnnnnnnnnnnnnnnnnnnnnnnnnnnnnnnnnnnnnnnnnnnnnnnnnnnnnnnnnnnnnnnnnnnnnnnnnnnnnnnnnnnnnnnnnnnnnnnnnnnnnnnnnnnnnnnnnnnnnnnnnnnnnnnnnnnnnnnnnnnnnnnnnnnnnnnnnnnnnnnnnnnnnnnnnnnnnnnnnnnnnnnnnnnnnnnnnnnnnnnnnnnnnnnnnnnnnnnnnnnnnnnnnnnnnnnnnnnnnnnnnnnnnnnnnnnnnnnnnnnnnnnnnnnnnnnnnnnnnnnnnnnnnnnnnnnnnnnnnnnnnnnnnnnnnnnnnnnnnnnnnnnnnnnnnnnnnnnnnnnnnnnnnnnnnnnnnnnnnnnnnnnnnnnnnnnnnnnnnnnnnnnnnnnnnnnnnnnnnnnnnnnnnnnnnnnnnnnnnnnnnnnnnnnnnnnnnnnnnnnnnnnnnnnnnnnnnnnnnnnnnnnnnnnnnnnnnnnnnnnnnnnnnnnnnnnnnnnnnnnnnnnnnnnnnnnnnnnnnnnnnnnnnnnnnnnnnnnnnnnnnnnnnnnnnnnnnnnnnnnnnnnnnnnnnnnnnnnnnnnnnnnnnnnnnnnnnnnnnnnnnnnnnnnnnnnnnnnnnnnnnnnnnnnnnnnnnnnnnnnnnnnnnnnnnnnnnnnnnnnnnnnnnnnnnnnnnnnnnnnnnnnnnnnnnnnnnnnnnnnnnnnnnnnnnnnnnnnnnnnnnnnnnnnnnnnnnnnnnnnnnnnnnnnnnnnnnnnnnnnnnnnnnnnnnnnnnnnnnnnnnnnnnnnnnnnnnnnnnnnnnnnnnnnnnnnnnnnnnnnnnnnnnnnnnnnnnnnnnnnnnnnnnnnnnnnnnnnnnnnnnnnnnnnnnnnnnnnnnnnnnnnnnnnnnnnnnnnnnnnnnnnnnnnnnnnnnnnnnnnnnnnnnnnnnnnnnnnnnnnnnnnnnnnnnnnnnnnnnnnnnnnnnnnnnnnnnnnnnnnnnnnnnnnnnnnnnnnnnnnnnnnnnnnnnnnnnnnnnnnnnnnnnnnnnnnnnnnnnnnnnnnnnnnnnnnnnnnnnnnnnnnnnnnnnnnnnnnnnnnnnnnnnnnnnnnnnnnnnnnnnnnnnnnnnnnnnnnnnnnnnnnnnnnnnnnnnnnnnnnnnnnnnnnnnnnnnnnnnnnnnnnnnnnnnnnnnnnnnnnnnnnnnnnnnnnnnnnnnnnnnnnnnnnnnnnnnnnnnnnnnnnnnnnnnnnnnnnnnnnnnnnnnnnnnnnnnnnnnnnnnnnnnnnnnnnnnnnnnnnnnnnnnnnnnnnnnnnnnnnnnnnnnnnnnnnnnnnnnnnnnnnnnnnnnnnnnnnnnnnnnnnnnnnnnnnnnnnnnnnnnnnnnnnnnnnnnnnnnnnnnnnnnnnnnnnnnnnnnnnnnnnnnnnnnnnnnnnnnnnnnnnnnnnnnnnnnnnnnnnnnnnnnnnnnnnnnnnnnnnnnnnnnnnnnnnnnnnnnnnnnnnnnnnnnnnnnnnnnnnnnnnnnnnnnnnnnnnnnnnnnnnnnnnnnnnnnnnnnnnnnnnnnnnnnnnnnnnnnnnnnnnnnnnnnnnnnnnnnnnnnnnnnnnnnnnnnnnnnnnnnnnnnnnnnnnnnnnnnnnnnnnnnnnnnnnnnnnnnnnnnnnnnnnnnnnnnnnnnnnnnnnnnnnnnnnnnnnnnnnnnnnnnnnnnnnnnnnnnnnnnnnnnnnnnnnnnnnnnnnnnnnnnnnnnnnnnnnnnnnnnnnnnnnnnnnnnnnnnnnnnnnnnnnnnnnnnnnnnnnnnnnnnnnnnnnnnnnnnnnnnnnnnnnnnnnnnnnnnnnnnnnnnnnnnnnnnnnnnnnnnnnnnnnnnnnnnnnnnnnnnnnnnnnnnnnnnnnnnnnnnnnnnnnnnnnnnnnnnnnnnnnnnnnnnnnnnnnnnnnnnnnnnnnnnnnnnnnnnnnnnnnnnnnnnnnnnnnnnnnnnnnnnnnnnnnnnnnnnnnnnnnnnnnnnnnnnnnnnnnnnnnnnnnnnnnnnnnnnnnnnnnnnnnnnnnnnnnnnnnnnnnnnnnnnnnnnnnnnnnnnnnnnnnnnnnnnnnnnnnnnnnnnnnnnnnnnnnnnnnnnnnnnnnnnnnnnnnnnnnnnnnnnnnnnnnnnnnnnnnnnnnnnnnnnnnnnnnnnnnnnnnnnnnnnnnnnnnnnnnnnnnnnnnnnnnnnnnnnnnnnnnnnnnnnnnnnnnnnnnnnnnnnnnnnnnnnnnnnnnnnnnnnnnnnnnnnnnnnnnnnnnnnnnnnnnnnnnnnnnnnnnnnnnnnnnnnnnnnnnnnnnnnnnnnnnnnnnnnnnnnnnnnnnnnnnnnnnnnnnnnnnnnnnnnnnnnnnnnnnnnnnnnnnnnnnnnnnnnnnnnnnnnnnnnnnnnnnnnnnnnnnnnnnnnnnnnnnnnnnnnnnnnnnnnnnnnnnnnnnnnnnnnnnnnnnnnnnnnnnnnnnnnnnnnnnnnnnnnnnnnnnnnnnnnnnnnnnnnnnnnnnnnnnnnnnnnnnnnnnnnnnnnnnnnnnnnnnnnnnnnnnnnnnnnnnnnnnnnnnnnnnnnnnnnnnnnnnnnnnnnnnnnnnnnnnnnnnnnnnnnnnnnnnnnnnnnnnnnnnnnnnnnnnnnnnnnnnnnnnnnnnnnnnnnnnnnnnnnnnnnnnnnnnnnnnnnnnnnnnnnnnnnnnnnnnnnnnnnnnnnnnnnnnnnnnnnnnnnnnnnnnnnnnnnnnnnnnnnnnnnnnnnnnnnnnnnnnnnnnnnnnnnnnnnnnnnnnnnnnnnnnnnnnnnnnnnnnnnnnnnnnnnnnnnnnnnnnnnnnnnnnnnnnnnnnnnnnnnnnnnnnnnnnnnnnnnnnnnnnnnnnnnnnnnnnnnnnnnnnnnnnnnnnnnnnnnnnnnnnnnnnnnnnnnnnnnnnnnnnnnnnnnnnnnnnnnnnnnnnnnnnnnnnnnnnnnnnnnnnnnnnnnnnnnnnnnnnnnnnnnnnnnnnnnnnnnnnnnnnnnnnnnnnnnnnnnnnnnnnnnnnnnnnnnnnnnnnnnnnnnnnnnnnnnnnnnnnnnnnnnnnnnnnnnnnnnnnnnnnnnnnnnnnnnnnnnnnnnnnnnnnnnnnnnnnnnnnnnnnnnnnnnnnnnnnnnnnnnnnnnnnnnnnnnnnnnnnnnnnnnnnnnnnnnnnnnnnnnnnnnnnnnnnnnnnnnnnnnnnnnnnnnnnnnnnnnnnnnnnnnnnnnnnnnnnnnnnnnnnnnnnnnnnnnnnnnnnnnnnnnnnnnnnnnnnnnnnnnnnnnnnnnnnnnnnnnnnnnnnnnnnnnnnnnnnnnnnnnnnnnnnnnnnnnnnnnnnnnnnnnnnnnnnnnnnnnnnnnnnnnnnnnnnnnnnnnnnnnnnnnnnnnnnnnnnnnnnnnnnnnnnnnnnnnnnnnnnnnnnnnnnnnnnnnnnnnnnnnnnnnnnnnnnnnnnnnnnnnnnnnnnnnnnnnnnnnnnnnnnnnnnnnnnnnnnnnnnnnnnnnnnnnnnnnnnnnnnnnnnnnnnnnnnnnnnnnnnnnnnnnnnnnnnnnnnnnnnnnnnnnnnnnnnnnnnnnnnnnnnnnnnnnnnnnnnnnnnnnnnnnnnnnnnnnnnnnnnnnnnnnnnnnnnnnnnnnnnnnnnnnnnnnnnnnnnnnnnnnnnnnnnnnnnnnnnnnnnnnnnnnnnnnnnnnnnnnnnnnnnnnnnnnnnnnnnnnnnnnnnnnnnnnnnnnnnnnnnnnnnnnnnnnnnnnnnnnnnnnnnnnnnnnnnnnnnnnnnnnnnnnnnnnnnnnnnnnnnnnnnnnnnnnnnnnnnnnnnnnnnnnnnnnnnnnnnnnnnnnnnnnnnnnnnnnnnnnnnnnnnnnnnnnnnnnnnnnnnnnnnnnnnnnnnnnnnnnnnnnnnnnnnnnnnnnnnnnnnnnnnnnnnnnnnnnnnnnnnnnnnnnnnnnnnnnnnnnnnnnnnnnnnnnnnnnnnnnnnnnnnnnnnnnnnnnnnnnnnnnnnnnnnnnnnnnnnnnnnnnnnnnnnnnnnnnnnnnnnnnnnnnnnnnnnnnnnnnnnnnnnnnnnnnnnnnnnnnnnnnnnnnnnnnnnnnnnnnnnnnnnnnnnnnnnnnnnnnnnnnnnnnnnnnnnnnnnnnnnnnnnnnnnnnnnnnnnnnnnnnnnnnnnnnnnnnnnnnnnnnnnnnnnnnnnnnnnnnnnnnnnnnnnnnnnnnnnnnnnnnnnnnnnnnnnnnnnnnnnnnnnnnnnnnnnnnnnnnnnnnnnnnnnnnnnnnnnnnnnnnnnnnnnnnnnnnnnnnnnnnnnnnnnnnnnnnnnnnnnnnnnnnnnnnnnnnnnnnnnnnnnnnnnnnnnnnnnnnnnnnnnnnnnnnnnnnnnnnnnnnnnnnnnnnnnnnnnnnnnnnnnnnnnnnnnnnnnnnnnnnnnnnnnnnnnnnnnnnnnnnnnnnnnnnnnnnnnnnnnnnnnnnnnnnnnnnnnnnnnnnnnnnnnnnnnnnnnnnnnnnnnnnnnnnnnnnnnnnnnnnnnnnnnnnnnnnnnnnnnnnnnnnnnnnnnnnnnnnnnnnnnnnnnnnnnnnnnnnnnnnnnnnnnnnnnnnnnnnnnnnnnnnnnnnnnnnnnnnnnnnnnnnnnnnnnnnnnnnnnnnnnnnnnnnnnnnnnnnnnnnnnnnnnnnnnnnnnnnnnnnnnnnnnnnnnnnnnnnnnnnnnnnnnnnnnnnnnnnnnnnnnnnnnnnnnnnnnnnnnnnnnnnnnnnnnnnnnnnnnnnnnnnnnnnnnnnnnnnnnnnnnnnnnnnnnnnnnnnnnnnnnnnnnnnnnnnnnnnnnnnnnnnnnnnnnnnnnnnnnnnnnnnnnnnnnnnnnnnnnnnnnnnnnnnnnnnnnnnnnnnnnnnnnnnnnnnnnnnnnnnnnnnnnnnnnnnnnnnnnnnnnnnnnnnnnnnnnnnnnnnnnnnnnnnnnnnnnnnnnnnnnnnnnnnnnnnnnnnnnnnnnnnnnnnnnnnnnnnnnnnnnnnnnnnnnnnnnnnnnnnnnnnnnnnnnnnnnnnnnnnnnnnnnnnnnnnnnnnnnnnnnnnnnnnnnnnnnnnnnnnnnnnnnnnnnnnnnnnnnnnnnnnnnnnnnnnnnnnnnnnnnnnnnnnnnnnnnnnnnnnnnnnnnnnnnnnnnnnnnnnnnnnnnnnnnnnnnnnnnnnnnnnnnnnnnnnnnnnnnnnnnnnnnnnnnnnnnnnnnnnnnnnnnnnnnnnnnnnnnnnnnnnnnnnnnnnnnnnnnnnnnnnnnnnnnnnnnnnnnnnnnnnnnnnnnnnnnnnnnnnnnnnnnnnnnnnnnnnnnnnnnnnnnnnnnnnnnnnnnnnnnnnnnnnnnnnnnnnnnnnnnnnnnnnnnnnnnnnnnnnnnnnnnnnnnnnnnnnnnnnnnnnnnnnnnnnnnnnnnnnnnnnnnnnnnnnnnnnnnnnnnnnnnnnnnnnnnnnnnnnnnnnnnnnnnnnnnnnnnnnnnnnnnnnnnnnnnnnnnnnnnnnnnnnnnnnnnnnnnnnnnnnnnnnnnnnnnnnnnnnnnnnnnnnnnnnnnnnnnnnnnnnnnnnnnnnnnnnnnnnnnnnnnnnnnnnnnnnnnnnnnnnnnnnnnnnnnnnnnnnnnnnnnnnnnnnnnnnnnnnnnnnnnnnnnnnnnnnnnnnnnnnnnnnnnnnnnnnnnnnnnnnnnnnnnnnnnnnnnnnnnnnnnnnnnnnnnnnnnnnnnnnnnnnnnnnnnnnnnnnnnnnnnnnnnnnnnnnnnnnnnnnnnnnnnnnnnnnnnnnnnnnnnnnnnnnnnnnnnnnnnnnnnnnnnnnnnnnnnnnnnnnnnnnnnnnnnnnnnnnnnnnnnnnnnnnnnnnnnnnnnnnnnnnnnnnnnnnnnnnnnnnnnnnnnnnnnnnnnnnnnnnnnnnnnnnnnnnnnnnnnnnnnnnnnnnnnnnnnnnnnnnnnnnnnnnnnnnnnnnnnnnnnnnnnnnnnnnnnnnnnnnnnnnnnnnnnnnnnnnnnnnnnnnnnnnnnnnnnnnnnnnnnnnnnnnnnnnnnnnnnnnnnnnnnnnnnnnnnnnnnnnnnnnnnnnnnnnnnnnnnnnnnnnnnnnnnnnnnnnnnnnnnnnnnnnnnnnnnnnnnnnnnnnnnnnnnnnnnnnnnnnnnnnnnnnnnnnnnnnnnnnnnnnnnnnnnnnnnnnnnnnnnnnnnnnnnnnnnnnnnnnnnnnnnnnnnnnnnnnnnnnnnnnnnnnnnnnnnnnnnnnnnnnnnnnnnnnnnnnnnnnnnnnnnnnnnnnnnnnnnnnnnnnnnnnnnnnnnnnnnnnnnnnnnnnnnnnnnnnnnnnnnnnnnnnnnnnnnnnnnnnnnnnnnnnnnnnnnnnnnnnnnnnnnnnnnnnnnnnnnnnnnnnnnnnnnnnnnnnnnnnnnnnnnnnnnnnnnnnnnnnnnnnnnnnnnnnnnnnnnnnnnnnnnnnnnnnnnnnnnnnnnnnnnnnnnnnnnnnnnnnnnnnnnnnnnnnnnnnnnnnnnnnnnnnnnnnnnnnnnnnnnnnnnnnnnnnnnnnnnnnnnnnnnnnnnnnnnnnnnnnnnnnnnnnnnnnnnnnnnnnnnnnnnnnnnnnnnnnnnnnnnnnnnnnnnnnnnnnnnnnnnnnnnnnnnnnnnnnnnnnnnnnnnnnnnnnnnnnnnnnnnnnnnnnnnnnnnnnnnnnnnnnnnnnnnnnnnnnnnnnnnnnnnnnnnnnnnnnnnnnnnnnnnnnnnnnnnnnnnnnnnnnnnnnnnnnnnnnnnnnnnnnnnnnnnnnnnnnnnnnnnnnnnnnnnnnnnnnnnnnnnnnnnnnnnnnnnnnnnnnnnnnnnnnnnnnnnnnnnnnnnnnnnnnnnnnnnnnnnnnnnnnnnnnnnnnnnnnnnnnnnnnnnnnnnnnnnnnnnnnnnnnnnnnnnnnnnnnnnnnnnnnnnnnnnnnnnnnnnnnnnnnnnnnnnnnnnnnnnnnnnnnnnnnnnnnnnnnnnnnnnnnnnnnnnnnnnnnnnnnnnnnnnnnnnnnnnnnnnnnnnnnnnnnnnnnnnnnnnnnnnnnnnnnnnnnnnnnnnnnnnnnnnnnnnnnnnnnnnnnnnnnnnnnnnnnnnnnnnnnnnnnnnnnnnnnnnnnnnnnnnnnnnnnnnnnnnnnnnnnnnnnnnnnnnnnnnnnnnnnnnnnnnnnnnnnnnnnnnnnnnnnnnnnnnnnnnnnnnnnnnnnnnnnnnnnnnnnnnnnnnnnnnnnnnnnnnnnnnnnnnnnnnnnnnnnnnnnnnnnnnnnnnnnnnnnnnnnnnnnnnnnnnnnnnnnnnnnnnnnnnnnnnnnnnnnnnnnnnnnnnnnnnnnnnnnnnnnnnnnnnnnnnnnnnnnnnnnnnnnnnnnnnnnnnnnnnnnnnnnnnnnnnnnnnnnnnnnnnnnnnnnnnnnnnnnnnnnnnnnnnnnnnnnnnnnnnnnnnnnnnnnnnnnnnnnnnnnnnnnnnnnnnnnnnnnnnnnnnnnnnnnnnnnnnnnnnnnnnnnnnnnnnnnnnnnnnnnnnnnnnnnnnnnnnnnnnnnnnnnnnnnnnnnnnnnnnnnnnnnnnnnnnnnnnnnnnnnnnnnnnnnnnnnnnnnnnnnnnnnnnnnnnnnnnnnnnnnnnnnnnnnnnnnnnnnnnnnnnnnnnnnnnnnnnnnnnnnnnnnnnnnnnnnnnnnnnnnnnnnnnnnnnnnnnnnnnnnnnnnnnnnnnnnnnnnnnnnnnnnnnnnnnnnnnnnnnnnnnnnnnnnnnnnnnnnnnnnnnnnnnnnnnnnnnnnnnnnnnnnnnnnnnnnnnnnnnnnnnnnnnnnnnnnnnnnnnnnnnnnnnnnnnnnnnnnnnnnnnnnnnnnnnnnnnnnnnnnnnnnnnnnnnnnnnnnnnnnnnnnnnnnnnnnnnnnnnnnnnnnnnnnnnnnnnnnnnnnnnnnnnnnnnnnnnnnnnnnnnnnnnnnnnnnnnnnnnnnnnnnnnnnnnnnnnnnnnnnnnnnnnnnnnnnnnnnnnnnnnnnnnnnnnnnnnnnnnnnnnnnnnnnnnnnnnnnnnnnnnnnnnnnnnnnnnnnnnnnnnnnnnnnnnnnnnnnnnnnnnnnnnnnnnnnnnnnnnnnnnnnnnnnnnnnnnnnnnnnnnnnnnnnnnnnnnnnnnnnnnnnnnnnnnnnnnnnnnnnnnnnnnnnnnnnnnnnnnnnnnnnnnnnnnnnnnnnnnnnnnnnnnnnnnnnnnnnnnnnnnnnnnnnnnnnnnnnnnnnnnnnnnnnnnnnnnnnnnnnnnnnnnnnnnnnnnnnnnnnnnnnnnnnnnnnnnnnnnnnnnnnnnnnnnnnnnnnnnnnnnnnnnnnnnnnnnnnnnnnnnnnnnnnnnnnnnnnnnnnnnnnnnnnnnnnnnnnnnnnnnnnnnnnnnnnnnnnnnnnnnnnnnnnnnnnnnnnnnnnnnnnnnnnnnnnnnnnnnnnnnnnnnnnnnnnnnnnnnnnnnnnnnnnnnnnnnnnnnnnnnnnnnnnnnnnnnnnnnnnnnnnnnnnnnnnnnnnnnnnnnnnnnnnnnnnnnnnnnnnnnnnnnnnnnnnnnnnnnnnnnnnnnnnnnnnnnnnnnnnnnnnnnnnnnnnnnnnnnnnnnnnnnnnnnnnnnnnnnnnnnnnnnnnnnnnnnnnnnnnnnnnnnnnnnnnnnnnnnnnnnnnnnnnnnnnnnnnnnnnnnnnnnnnnnnnnnnnnnnnnnnnnnnnnnnnnnnnnnnnnnnnnnnnnnnnnnnnnnnnnnnnnnnnnnnnnnnnnnnnnnnnnnnnnnnnnnnnnnnnnnnnnnnnnnnnnnnnnnnnnnnnnnnnnnnnnnnnnnnnnnnnnnnnnnnnnnnnnnnnnnnnnnnnnnnnnnnnnnnnnnnnnnnnnnnnnnnnnnnnnnnnnnnnnnnnnnnnnnnnnnnnnnnnnnnnnnnnnnnnnnnnnnnnnnnnnnnnnnnnnnnnnnnnnnnnnnnnnnnnnnnnnnnnnnnnnnnnnnnnnnnnnnnnnnnnnnnnnnnnnnnnnnnnnnnnnnnnnnnnnnnnnnnnnnnnnnnnnnnnnnnnnnnnnnnnnnnnnnnnnnnnnnnnnnnnnnnnnnnnnnnnnnnnnnnnnnnnnnnnnnnnnnnnnnnnnnnnnnnnnnnnnnnnnnnnnnnnnnnnnnnnnnnnnnnnnnnnnnnnnnnnnnnnnnnnnnnnnnnnnnnnnnnnnnnnnnnnnnnnnnnnnnnnnnnnnnnnnnnnnnnnnnnnnnnnnnnnnnnnnnnnnnnnnnnnnnnnnnnnnnnnnnnnnnnnnnnnnnnnnnnnnnnnnnnnnnnnnnnnnnnnnnnnnnnnnnnnnnnnnnnnnnnnnnnnnnnnnnnnnnnnnnnnnnnnnnnnnnnnnnnnnnnnnnnnnnnnnnnnnnnnnnnnnnnnnnnnnnnnnnnnnnnnnnnnnnnnnnnnnnnnnnnnnnnnnnnnnnnnnnnnnnnnnnnnnnnnnnnnnnnnnnnnnnnnnnnnnnnnnnnnnnnnnnnnnnnnnnnnnnnnnnnnnnnnnnnnnnnnnnnnnnnnnnnnnnnnnnnnnnnnnnnnnnnnnnnnnnnnnnnnnnnnnnnnnnnnnnnnnnnnnnnnnnnnnnnnnnnnnnnnnnnnnnnnnnnnnnnnnnnnnnnnnnnnnnnnnnnnnnnnnnnnnnnnnnnnnnnnnnnnnnnnnnnnnnnnnnnnnnnnnnnnnnnnnnnnnnnnnnnnnnnnnnnnnnnnnnnnnnnnnnnnnnnnnnnnnnnnnnnnnnnnnnnnnnnnnnnnnnnnnnnnnnnnnnnnnnnnnnnnnnnnnnnnnnnnnnnnnnnnnnnnnnnnnnnnnnnnnnnnnnnnnnnnnnnnnnnnnnnnnnnnnnnnnnnnnnnnnnnnnnnnnnnnnnnnnnnnnnnnnnnnnnnnnnnnnnnnnnnnnnnnnnnnnnnnnnnnnnnnnnnnnnnnnnnnnnnnnnnnnnnnnnnnnnnnnnnnnnnnnnnnnnnnnnnnnnnnnnnnnnnnnnnnnnnnnnnnnnnnnnnnnnnnnnnnnnnnnnnnnnnnnnnnnnnnnnnnnnnnnnnnnnnnnnnnnnnnnnnnnnnnnnnnnnnnnnnnnnnnnnnnnnnnnnnnnnnnnnnnnnnnnnnnnnnnnnnnnnnnnnnnnnnnnnnnnnnnnnnnnnnnnnnnnnnnnnnnnnnnnnnnnnnnnnnnnnnnnnnnnnnnnnnnnnnnnnnnnnnnnnnnnnnnnnnnnnnnnnnnnnnnnnnnnnnnnnnnnnnnnnnnnnnnnnnnnnnnnnnnnnnnnnnnnnnnnnnnnnnnnnnnnnnnnnnnnnnnnnnnnnnnnnnnnnnnnnnnnnnnnnnnnnnnnnnnnnnnnnnnnnnnnnnnnnnnnnnnnnnnnnnnnnnnnnnnnnnnnnnnnnnnnnnnnnnnnnnnnnnnnnnnnnnnnnnnnnnnnnnnnnnnnnnnnnnnnnnnnnnnnnnnnnnnnnnnnnnnnnnnnnnnnnnnnnnnnnnnnnnnnnnnnnnnnnnnnnnnnnnnnnnnnnnnnnnnnnnnnnnnnnnnnnnnnnnnnnnnnnnnnnnnnnnnnnnnnnnnnnnnnnnnnnnnnnnnnnnnnnnnnnnnnnnnnnnnnnnnnnnnnnnnnnnnnnnnnnnnnnnnnnnnnnnnnnnnnnnnnnnnnnnnnnnnnnnnnnnnnnnnnnnnnnnnnnnnnnnnnnnnnnnnnnnnnnnnnnnnnnnnnnnnnnnnnnnnnnnnnnnnnnnnnnnnnnnnnnnnnnnnnnnnnnnnnnnnnnnnnnnnnnnnnnnnnnnnnnnnnnnnnnnnnnnnnnnnnnnnnnnnnnnnnnnnnnnnnnnnnnnnnnnnnnnnnnnnnnnnnnnnnnnnnnnnnnnnnnnnnnnnnnnnnnnnnnnnnnnnnnnnnnnnnnnnnnnnnnnnnnnnnnnnnnnnnnnnnnnnnnnnnnnnnnnnnnnnnnnnnnnnnnnnnnnnnnnnnnnnnnnnnnnnnnnnnnnnnnnnnnnnnnnnnnnnnnnnnnnnnnnnnnnnnnnnnnnnnnnnnnnnnnnnnnnnnnnnnnnnnnnnnnnnnnnnnnnnnnnnnnnnnnnnnnnnnnnnnnnnnnnnnnnnnnnnnnnnnnnnnnnnnnnnnnnnnnnnnnnnnnnnnnnnnnnnnnnnnnnnnnnnnnnnnnnnnnnnnnnnnnnnnnnnnnnnnnnnnnnnnnnnnnnnnnnnnnnnnnnnnnnnnnnnnnnnnnnnnnnnnnnnnnnnnnnnnnnnnnnnnnnnnnnnnnnnnnnnnnnnnnnnnnnnnnnnnnnnnnnnnnnnnnnnnnnnnnnnnnnnnnnnnnnnnnnnnnnnnnnnnnnnnnnnnnnnnnnnnnnnnnnnnnnnnnnnnnnnnnnnnnnnnnnnnnnnnnnnnnnnnnnnnnnnnnnnnnnnnnnnnnnnnnnnnnnnnnnnnnnnnnnnnnnnnnnnnnnnnnnnnnnnnnnnnnnnnnnnnnnnnnnnnnnnnnnnnnnnnnnnnnnnnnnnnnnnnnnnnnnnnnnnnnnnnnnnnnnnnnnnnnnnnnnnnnnnnnnnnnnnnnnnnnnnnnnnnnnnnnnnnnnnnnnnnnnnnnnnnnnnnnnnnnnnnnnnnnnnnnnnnnnnnnnnnnnnnnnnnnnnnnnnnnnnnnnnnnnnnnnnnnnnnnnnnnnnnnnnnnnnnnnnnnnnnnnnnnnnnnnnnnnnnnnnnnnnnnnnnnnnnnnnnnnnnnnnnnnnnnnnnnnnnnnnnnnnnnnnnnnnnnnnnnnnnnnnnnnnnnnnnnnnnnnnnnnnnnnnnnnnnnnnnnnnnnnnnnnnnnnnnnnnnnnnnnnnnnnnnnnnnnnnnnnnnnnnnnnnnnnnnnnnnnnnnnnnnnnnnnnnnnnnnnnnnnnnnnnnnnnnnnnnnnnnnnnnnnnnnnnnnnnnnnnnnnnnnnnnnnnnnnnnnnnnnnnnnnnnnnnnnnnnnnnnnnnnnnnnnnnnnnnnnnnnnnnnnnnnnnnnnnnnnnnnnnnnnnnnnnnnnnnnnnnnnnnnnnnnnnnnnnnnnnnnnnnnnnnnnnnnnnnnnnnnnnnnnnnnnnnnnnnnnnnnnnnnnnnnnnnnnnnnnnnnnnnnnnnnnnnnnnnnnnnnnnnnnnnnnnnnnnnnnnnnnnnnnnnnnnnnnnnnnnnnnnnnnnnnnnnnnnnnnnnnnnnnnnnnnnnnnnnnnnnnnnnnnnnnnnnnnnnnnnnnnnnnnnnnnnnnnnnnnnnnnnnnnnnnnnnnnnnnnnnnnnnnnnnnnnnnnnnnnnnnnnnnnnnnnnnnnnnnnnnnnnnnnnnnnnnnnnnnnnnnnnnnnnnnnnnnnnnnnnnnnnnnnnnnnnnnnnnnnnnnnnnnnnnnnnnnnnnnnnnnnnnnnnnnnnnnnnnnnnnnnnnnnnnnnnnnnnnnnnnnnnnnnnnnnnnnnnnnnnnnnnnnnnnnnnnnnnnnnnnnnnnnnnnnnnnnnnnnnnnnnnnnnnnnnnnnnnnnnnnnnnnnnnnnnnnnnnnnnnnnnnnnnnnnnnnnnnnnnnnnnnnnnnnnnnnnnnnnnnnnnnnnnnnnnnnnnnnnnnnnnnnnnnnnnnnnnnnnnnnnnnnnnnnnnnnnnnnnnnnnnnnnnnnnnnnnnnnnnnnnnnnnnnnnnnnnnnnnnnnnnnnnnnnnnnnnnnnnnnnnnnnnnnnnnnnnnnnnnnnnnnnnnnnnnnnnnnnnnnnnnnnnnnnnnnnnnnnnnnnnnnnnnnnnnnnnnnnnnnnnnnnnnnnnnnnnnnnnnnnnnnnnnnnnnnnnnnnnnnnnnnnnnnnnnnnnnnnnnnnnnnnnnnnnnnnnnnnnnnnnnnnnnnnnnnnnnnnnnnnnnnnnnnnnnnnnnnnnnnnnnnnnnnnnnnnnnnnnnnnnnnnnnnnnnnnnnnnnnnnnnnnnnnnnnnnnnnnnnnnnnnnnnnnnnnnnnnnnnnnnnnnnnnnnnnnnnnnnnnnnnnnnnnnnnnnnnnnnnnnnnnnnnnnnnnnnnnnnnnnnnnnnnnnnnnnnnnnnnnnnnnnnnnnnnnnnnnnnnnnnnnnnnnnnnnnnnnnnnnnnnnnnnnnnnnnnnnnnnnnnnnnnnnnnnnnnnnnnnnnnnnnnnnnnnnnnnnnnnnnnnnnnnnnnnnnnnnnnnnnnnnnnnnnnnnnnnnnnnnnnnnnnnnnnnnnnnnnnnnnnnnnnnnnnnnnnnnnnnnnnnnnnnnnnnnnnnnnnnnnnnnnnnnnnnnnnnnnnnnnnnnnnnnnnnnnnnnnnnnnnnnnnnnnnnnnnnnnnnnnnnnnnnnnnnnnnnnnnnnnnnnnnnnnnnnnnnnnnnnnnnnnnnnnnnnnnnnnnnnnnnnnnnnnnnnnnnnnnnnnnnnnnnnnnnnnnnnnnnnnnnnnnnnnnnnnnnnnnnnnnnnnnnnnnnnnnnnnnnnnnnnnnnnnnnnnnnnnnnnnnnnnnnnnnnnnnnnnnnnnnnnnnnnnnnnnnnnnnnnnnnnnnnnnnnnnnnnnnnnnnnnnnnnnnnnnnnnnnnnnnnnnnnnnnnnnnnnnnnnnnnnnnnnnnnnnnnnnnnnnnnnnnnnnnnnnnnnnnnnnnnnnnnnnnnnnnnnnnnnnnnnnnnnnnnnnnnnnnnnnnnnnnnnnnnnnnnnnnnnnnnnnnnnnnnnnnnnnnnnnnnnnnnnnnnnnnnnnnnnnnnnnnnnnnnnnnnnnnnnnnnnnnnnnnnnnnnnnnnnnnnnnnnnnnnnnnnnnnnnnnnnnnnnnnnnnnnnnnnnnnnnnnnnnnnnnnnnnnnnnnnnnnnnnnnnnnnnnnnnnnnnnnnnnnnnnnnnnnnnnnnnnnnnnnnnnnnnnnnnnnnnnnnnnnnnnnnnnnnnnnnnnnnnnnnnnnnnnnnnnnnnnnnnnnnnnnnnnnnnnnnnnnnnnnnnnnnnnnnnnnnnnnnnnnnnnnnnnnnnnnnnnnnnnnnnnnnnnnnnnnnnnnnnnnnnnnnnnnnnnnnnnnnnnnnnnnnnnnnnnnnnnnnnnnnnnnnnnnnnnnnnnnnnnnnnnnnnnnnnnnnnnnnnnnnnnnnnnnnnnnnnnnnnnnnnnnnnnnnnnnnnnnnnnnnnnnnnnnnnnnnnnnnnnnnnnnnnnnnnnnnnnnnnnnnnnnnnnnnnnnnnnnnnnnnnnnnnnnnnnnnnnnnnnnnnnnnnnnnnnnnnnnnnnnnnnnnnnnnnnnnnnnnnnnnnnnnnnnnnnnnnnnnnnnnnnnnnnnnnnnnnnnnnnnnnnnnnnnnnnnnnnnnnnnnnnnnnnnnnnnnnnnnnnnnnnnnnnnnnnnnnnnnnnnnnnnnnnnnnnnnnnnnnnnnnnnnnnnnnnnnnnnnnnnnnnnnnnnnnnnnnnnnnnnnnnnnnnnnnnnnnnnnnnnnnnnnnnnnnnnnnnnnnnnnnnnnnnnnnnnnnnnnnnnnnnnnnnnnnnnnnnnnnnnnnnnnnnnnnnnnnnnnnnnnnnnnnnnnnnnnnnnnnnnnnnnnnnnnnnnnnnnnnnnnnnnnnnnnnnnnnnnnnnnnnnnnnnnnnnnnnnnnnnnnnnnnnnnnnnnnnnnnnnnnnnnnnnnnnnnnnnnnnnnnnnnnnnnnnnnnnnnnnnnnnnnnnnnnnnnnnnnnnnnnnnnnnnnnnnnnnnnnnnnnnnnnnnnnnnnnnnnnnnnnnnnnnnnnnnnnnnnnnnnnnnnnnnnnnnnnnnnnnnnnnnnnnnnnnnnnnnnnnnnnnnnnnnnnnnnnnnnnnnnnnnnnnnnnnnnnnnnnnnnnnnnnnnnnnnnnnnnnnnnnnnnnnnnnnnnnnnnnnnnnnnnnnnnnnnnnnnnnnnnnnnnnnnnnnnnnnnnnnnnnnnnnnnnnnnnnnnnnnnnnnnnnnnnnnnnnnnnnnnnnnnnnnnnnnnnnnnnnnnnnnnnnnnnnnnnnnnnnnnnnnnnnnnnnnnnnnnnnnnnnnnnnnnnnnnnnnnnnnnnnnnnnnnnnnnnnnnnnnnnnnnnnnnnnnnnnnnnnnnnnnnnnnnnnnnnnnnnnnnnnnnnnnnnnnnnnnnnnnnnnnnnnnnnnnnnnnnnnnnnnnnnnnnnnnnnnnnnnnnnnnnnnnnnnnnnnnnnnnnnnnnnnnnnnnnnnnnnnnnnnnnnnnnnnnnnnnnnnnnnnnnnnnnnnnnnnnnnnnnnnnnnnnnnnnnnnnnnnnnnnnnnnnnnnnnnnnnnnnnnnnnnnnnnnnnnnnnnnnnnnnnnnnnnnnnnnnnnnnnnnnnnnnnnnnnnnnnnnnnnnnnnnnnnnnnnnnnnnnnnnnnnnnnnnnnnnnnnnnnnnnnnnnnnnnnnnnnnnnnnnnnnnnnnnnnnnnnnnnnnnnnnnnnnnnnnnnnnnnnnnnnnnnnnnnnnnnnnnnnnnnnnnnnnnnnnnnnnnnnnnnnnnnnnnnnnnnnnnnnnnnnnnnnnnnnnnnnnnnnnnnnnnnnnnnnnnnnnnnnnnnnnnnnnnnnnnnnnnnnnnnnnnnnnnnnnnnnnnnnnnnnnnnnnnnnnnnnnnnnnnnnnnnnnnnnnnnnnnnnnnnnnnnnnnnnnnnnnnnnnnnnnnnnnnnnnnnnnnnnnnnnnnnnnnnnnnnnnnnnnnnnnnnnnnnnnnnnnnnnnnnnnnnnnnnnnnnnnnnnnnnnnnnnnnnnnnnnnnnnnnnnnnnnnnnnnnnnnnnnnnnnnnnnnnnnnnnnnnnnnnnnnnnnnnnnnnnnnnnnnnnnnnnnnnnnnnnnnnnnnnnnnnnnnnnnnnnnnnnnnnnnnnnnnnnnnnnnnnnnnnnnnnnnnnnnnnnnnnnnnnnnnnnnnnnnnnnnnnnnnnnnnnnnnnnnnnnnnnnnnnnnnnnnnnnnnnnnnnnnnnnnnnnnnnnnnnnnnnnnnnnnnnnnnnnnnnnnnnnnnnnnnnnnnnnnnnnnnnnnnnnnnnnnnnnnnnnnnnnnnnnnnnnnnnnnnnnnnnnnnnnnnnnnnnnnnnnnnnnnnnnnnnnnnnnnnnnnnnnnnnnnnnnnnnnnnnnnnnnnnnnnnnnnnnnnnnnnnnnnnnnnnnnnnnnnnnnnnnnnnnnnnnnnnnnnnnnnnnnnnnnnnnnnnnnnnnnnnnnnnnnnnnnnnnnnnnnnnnnnnnnnnnnnnnnnnnnnnnnnnnnnnnnnnnnnnnnnnnnnnnnnnnnnnnnnnnnnnnnnnnnnnnnnnnnnnnnnnnnnnnnnnnnnnnnnnnnnnnnnnnnnnnnnnnnnnnnnnnnnnnnnnnnnnnnnnnnnnnnnnnnnnnnnnnnnnnnnnnnnnnnnnnnnnnnnnnnnnnnnnnnnnnnnnnnnnnnnnnnnnnnnnnnnnnnnnnnnnnnnnnnnnnnnnnnnnnnnnnnnnnnnnnnnnnnnnnnnnnnnnnnnnnnnnnnnnnnnnnnnnnnnnnnnnnnnnnnnnnnnnnnnnnnnnnnnnnnnnnnnnnnnnnnnnnnnnnnnnnnnnnnnnnnnnnnnnnnnnnnnnnnnnnnnnnnnnnnnnnnnnnnnnnnnnnnnnnnnnnnnnnnnnnnnnnnnnnnnnnnnnnnnnnnnnnnnnnnnnnnnnnnnnnnnnnnnnnnnnnnnnnnnnnnnnnnnnnnnnnnnnnnnnnnnnnnnnnnnnnnnnnnnnnnnnnnnnnnnnnnnnnnnnnnnnnnnnnnnnnnnnnnnnnnnnnnnnnnnnnnnnnnnnnnnnnnnnnnnnnnnnnnnnnnnnnnnnnnnnnnnnnnnnnnnnnnnnnnnnnnnnnnnnnnnnnnnnnnnnnnnnnnnnnnnnnnnnnnnnnnnnnnnnnnnnnnnnnnnnnnnnnnnnnnnnnnnnnnnnnnnnnnnnnnnnnnnnnnnnnnnnnnnnnnnnnnnnnnnnnnnnnnnnnnnnnnnnnnnnnnnnnnnnnnnnnnnnnnnnnnnnnnnnnnnnnnnnnnnnnnnnnnnnnnnnnnnnnnnnnnnnnnnnnnnnnnnnnnnnnnnnnnnnnnnnnnnnnnnnnnnnnnnnnnnnnnnnnnnnnnnnnnnnnnnnnnnnnnnnnnnnnnnnnnnnnnnnnnnnnnnnnnnnnnnnnnnnnnnnnnnnnnnnnnnnnnnnnnnnnnnnnnnnnnnnnnnnnnnnnnnnnnnnnnnnnnnnnnnnnnnnnnnnnnnnnnnnnnnnnnnnnnnnnnnnnnnnnnnnnnnnnnnnnnnnnnnnnnnnnnnnnnnnnnnnnnnnnnnnnnnnnnnnnnnnnnnnnnnnnnnnnnnnnnnnnnnnnnnnnnnnnnnnnnnnnnnnnnnnnnnnnnnnnnnnnnnnnnnnnnnnnnnnnnnnnnnnnnnnnnnnnnnnnnnnnnnnnnnnnnnnnnnnnnnnnnnnnnnnnnnnnnnnnnnnnnnnnnnnnnnnnnnnnnnnnnnnnnnnnnnnnnnnnnnnnnnnnnnnnnnnnnnnnnnnnnnnnnnnnnnnnnnnnnnnnnnnnnnnnnnnnnnnnnnnnnnnnnnnnnnnnnnnnnnnnnnnnnnnnnnnnnnnnnnnnnnnnnnnnnnnnnnnnnnnnnnnnnnnnnnnnnnnnnnnnnnnnnnnnnnnnnnnnnnnnnnnnnnnnnnnnnnnnnnnnnnnnnnnnnnnnnnnnnnnnnnnnnnnnnnnnnnnnnnnnnnnnnnnnnnnnnnnnnnnnnnnnnnnnnnnnnnnnnnnnnnnnnnnnnnnnnnnnnnnnnnnnnnnnnnnnnnnnnnnnnnnnnnnnnnnnnnnnnnnnnnnnnnnnnnnnnnnnnnnnnnnnnnnnnnnnnnnnnnnnnnnnnnnnnnnnnnnnnnnnnnnnnnnnnnnnnnnnnnnnnnnnnnnnnnnnnnnnnnnnnnnnnnnnnnnnnnnnnnnnnnnnnnnnnnnnnnnnnnnnnnnnnnnnnnnnnnnnnnnnnnnnnnnnnnnnnnnnnnnnnnnnnnnnnnnnnnnnnnnnnnnnnnnnnnnnnnnnnnnnnnnnnnnnnnnnnnnnnnnnnnnnnnnnnnnnnnnnnnnnnnnnnnnnnnnnnnnnnnnnnnnnnnnnnnnnnnnnnnnnnnnnnnnnnnnnnnnnnnnnnnnnnnnnnnnnnnnnnnnnnnnnnnnnnnnnnnnnnnnnnnnnnnnnnnnnnnnnnnnnnnnnnnnnnnnnnnnnnnnnnnnnnnnnnnnnnnnnnnnnnnnnnnnnnnnnnnnnnnnnnnnnnnnnnnnnnnnnnnnnnnnnnnnnnnnnnnnnnnnnnnnnnnnnnnnnnnnnnnnnnnnnnnnnnnnnnnnnnnnnnnnnnnnnnnnnnnnnnnnnnnnnnnnnnnnnnnnnnnnnnnnnnnnnnnnnnnnnnnnnnnnnnnnnnnnnnnnnnnnnnnnnnnnnnnnnnnnnnnnnnnnnnnnnnnnnnnnnnnnnnnnnnnnnnnnnnnnnnnnnnnnnnnnnnnnnnnnnnnnnnnnnnnnnnnnnnnnnnnnnnnnnnnnnnnnnnnnnnnnnnnnnnnnnnnnnnnnnnnnnnnnnnnnnnnnnnnnnnnnnnnnnnnnnnnnnnnnnnnnnnnnnnnnnnnnnnnnnnnnnnnnnnnnnnnnnnnnnnnnnnnnnnnnnnnnnnnnnnnnnnnnnnnnnnnnnnnnnnnnnnnnnnnnnnnnnnnnnnnnnnnnnnnnnnnnnnnnnnnnnnnnnnnnnnnnnnnnnnnnnnnnnnnnnnnnnnnnnnnnnnnnnnnnnnnnnnnnnnnnnnnnnnnnnnnnnnnnnnnnnnnnnnnnnnnnnnnnnnnnnnnnnnnnnnnnnnnnnnnnnnnnnnnnnnnnnnnnnnnnnnnnnnnnnnnnnnnnnnnnnnnnnnnnnnnnnnnnnnnnnnnnnnnnnnnnnnnnnnnnnnnnnnnnnnnnnnnnnnnnnnnnnnnnnnnnnnnnnnnnnnnnnnnnnnnnnnnnnnnnnnnnnnnnnnnnnnnnnnnnnnnnnnnnnnnnnnnnnnnnnnnnnnnnnnnnnnnnnnnnnnnnnnnnnnnnnnnnnnnnnnnnnnnnnnnnnnnnnnnnnnnnnnnnnnnnnnnnnnnnnnnnnnnnnnnnnnnnnnnnnnnnnnnnnnnnnnnnnnnnnnnnnnnnnnnnnnnnnnnnnnnnnnnnnnnnnnnnnnnnnnnnnnnnnnnnnnnnnnnnnnnnnnnnnnnnnnnnnnnnnnnnnnnnnnnnnnnnnnnnnnnnnnnnnnnnnnnnnnnnnnnnnnnnnnnnnnnnnnnnnnnnnnnnnnnnnnnnnnnnnnnnnnnnnnnnnnnnnnnnnnnnnnnnnnnnnnnnnnnnnnnnnnnnnnnnnnnnnnnnnnnnnnnnnnnnnnnnnnnnnnnnnnnnnnnnnnnnnnnnnnnnnnnnnnnnnnnnnnnnnnnnnnnnnnnnnnnnnnnnnnnnnnnnnnnnnnnnnnnnnnnnnnnnnnnnnnnnnnnnnnnnnnnnnnnnnnnnnnnnnnnnnnnnnnnnnnnnnnnnnnnnnnnnnnnnnnnnnnnnnnnnnnnnnnnnnnnnnnnnnnnnnnnnnnnnnnnnnnnnnnnnnnnnnnnnnnnnnnnnnnnnnnnnnnnnnnnnnnnnnnnnnnnnnnnnnnnnnnnnnnnnnnnnnnnnnnnnnnnnnnnnnnnnnnnnnnnnnnnnnnnnnnnnnnnnnnnnnnnnnnnnnnnnnnnnnnnnnnnnnnnnnnnnnnnnnnnnnnnnnnnnnnnnnnnnnnnnnnnnnnnnnnnnnnnnnnnnnnnnnnnnnnnnnnnnnnnnnnnnnnnnnnnnnnnnnnnnnnnnnnnnnnnnnnnnnnnnnnnnnnnnnnnnnnnnnnnnnnnnnnnnnnnnnnnnnnnnnnnnnnnnnnnnnnnnnnnnnnnnnnnnnnnnnnnnnnnnnnnnnnnnnnnnnnnnnnnnnnnnnnnnnnnnnnnnnnnnnnnnnnnnnnnnnnnnnnnnnnnnnnnnnnnnnnnnnnnnnnnnnnnnnnnnnnnnnnnnnnnnnnnnnnnnnnnnnnnnnnnnnnnnnnnnnnnnnnnnnnnnnnnnnnnnnnnnnnnnnnnnnnnnnnnnnnnnnnnnnnnnnnnnnnnnnnnnnnnnnnnnnnnnnnnnnnnnnnnnnnnnnnnnnnnnnnnnnnnnnnnnnnnnnnnnnnnnnnnnnnnnnnnnnnnnnnnnnnnnnnnnnnnnnnnnnnnnnnnnnnnnnnnnnnnnnnnnnnnnnnnnnnnnnnnnnnnnnnnnnnnnnnnnnnnnnnnnnnnnnnnnnnnnnnnnnnnnnnnnnnnnnnnnnnnnnnnnnnnnnnnnnnnnnnnnnnnnnnnnnnnnnnnnnnnnnnnnnnnnnnnnnnnnnnnnnnnnnnnnnnnnnnnnnnnnnnnnnnnnnnnnnnnnnnnnnnnnnnnnnnnnnnnnnnnnnnnnnnnnnnnnnnnnnnnnnnnnnnnnnnnnnnnnnnnnnnnnnnnnnnnnnnnnnnnnnnnnnnnnnnnnnnnnnnnnnnnnnnnnnnnnnnnnnnnnnnnnnnnnnnnnnnnnnnnnnnnnnnnnnnnnnnnnnnnnnnnnnnnnnnnnnnnnnnnnnnnnnnnnnnnnnnnnnnnnnnnnnnnnnnnnnnnnnnnnnnnnnnnnnnnnnnnnnnnnnnnnnnnnnnnnnnnnnnnnnnnnnnnnnnnnnnnnnnnnnnnnnnnnnnnnnnnnnnnnnnnnnnnnnnnnnnnnnnnnnnnnnnnnnnnnnnnnnnnnnnnnnnnnnnnnnnnnnnnnnnnnnnnnnnnnnnnnnnnnnnnnnnnnnnnnnnnnnnnnnnnnnnnnnnnnnnnnnnnnnnnnnnnnnnnnnnnnnnnnnnnnnnnnnnnnnnnnnnnnnnnnnnnnnnnnnnnnnnnnnnnnnnnnnnnnnnnnnnnnnnnnnnnnnnnnnnnnnnnnnnnnnnnnnnnnnnnnnnnnnnnnnnnnnnnnnnnnnnnnnnnnnnnnnnnnnnnnnnnnnnnnnnnnnnnnnnnnnnnnnnnnnnnnnnnnnnnnnnnnnnnnnnnnnnnnnnnnnnnnnnnnnnnnnnnnnnnnnnnnnnnnnnnnnnnnnnnnnnnnnnnnnnnnnnnnnnnnnnnnnnnnnnnnnnnnnnnnnnnnnnnnnnnnnnnnnnnnnnnnnnnnnnnnnnnnnnnnnnnnnnnnnnnnnnnnnnnnnnnnnnnnnnnnnnnnnnnnnnnnnnnnnnnnnnnnnnnnnnnnnnnnnnnnnnnnnnnnnnnnnnnnnnnnnnnnnnnnnnnnnnnnnnnnnnnnnnnnnnnnnnnnnnnnnnnnnnnnnnnnnnnnnnnnnnnnnnnnnnnnnnnnnnnnnnnnnnnnnnnnnnnnnnnnnnnnnnnnnnnnnnnnnnnnnnnnnnnnnnnnnnnnnnnnnnnnnnnnnnnnnnnnnnnnnnnnnnnnnnnnnnnnnnnnnnnnnnnnnnnnnnnnnnnnnnnnnnnnnnnnnnnnnnnnnnnnnnnnnnnnnnnnnnnnnnnnnnnnnnnnnnnnnnnnnnnnnnnnnnnnnnnnnnnnnnnnnnnnnnnnnnnnnnnnnnnnnnnnnnnnnnnnnnnnnnnnnnnnnnnnnnnnnnnnnnnnnnnnnnnnnnnnnnnnnnnnnnnnnnnnnnnnnnnnnnnnnnnnnnnnnnnnnnnnnnnnnnnnnnnnnnnnnnnnnnnnnnnnnnnnnnnnnnnnnnnnnnnnnnnnnnnnnnnnnnnnnnnnnnnnnnnnnnnnnnnnnnnnnnnnnnnnnnnnnnnnnnnnnnnnnnnnnnnnnnnnnnnnnnnnnnnnnnnnnnnnnnnnnnnnnnnnnnnnnnnnnnnnnnnnnnnnnnnnnnnnnnnnnnnnnnnnnnnnnnnnnnnnnnnnnnnnnnnnnnnnnnnnnnnnnnnnnnnnnnnnnnnnnnnnnnnnnnnnnnnnnnnnnnnnnnnnnnnnnnnnnnnnnnnnnnnnnnnnnnnnnnnnnnnnnnnnnnnnnnnnnnnnnnnnnnnnnnnnnnnnnnnnnnnnnnnnnnnnnnnnnnnnnnnnnnnnnnnnnnnnnnnnnnnnnnnnnnnnnnnnnnnnnnnnnnnnnnnnnnnnnnnnnnnnnnnnnnnnnnnnnnnnnnnnnnnnnnnnnnnnnnnnnnnnnnnnnnnnnnnnnnnnnnnnnnnnnnnnnnnnnnnnnnnnnnnnnnnnnnnnnnnnnnnnnnnnnnnnnnnnnnnnnnnnnnnnnnnnnnnnnnnnnnnnnnnnnnnnnnnnnnnnnnnnnnnnnnnnnnnnnnnnnnnnnnnnnnnnnnnnnnnnnnnnnnnnnnnnnnnnnnnnnnnnnnnnnnnnnnnnnnnnnnnnnnnnnnnnnnnnnnnnnnnnnnnnnnnnnnnnnnnnnnnnnnnnnnnnnnnnnnnnnnnnnnnnnnnnnnnnnnnnnnnnnnnnnnnnnnnnnnnnnnnnnnnnnnnnnnnnnnnnnnnnnnnnnnnnnnnnnnnnnnnnnnnnnnnnnnnnnnnnnnnnnnnnnnnnnnnnnnnnnnnnnnnnnnnnnnnnnnnnnnnnnnnnnnnnnnnnnnnnnnnnnnnnnnnnnnnnnnnnnnnnnnnnnnnnnnnnnnnnnnnnnnnnnnnnnnnnnnnnnnnnnnnnnnnnnnnnnnnnnnnnnnnnnnnnnnnnnnnnnnnnnnnnnnnnnnnnnnnnnnnnnnnnnnnnnnnnnnnnnnnnnnnnnnnnnnnnnnnnnnnnnnnnnnnnnnnnnnnnnnnnnnnnnnnnnnnnnnnnnnnnnnnnnnnnnnnnnnnnnnnnnnnnnnnnnnnnnnnnnnnnnnnnnnnnnnnnnnnnnnnnnnnnnnnnnnnnnnnnnnnnnnnnnnnnnnnnnnnnnnnnnnnnnnnnnnnnnnnnnnnnnnnnnnnnnnnnnnnnnnnnnnnnnnnnnnnnnnnnnnnnnnnnnnnnnnnnnnnnnnnnnnnnnnnnnnnnnnnnnnnnnnnnnnnnnnnnnnnnnnnnnnnnnnnnnnnnnnnnnnnnnnnnnnnnnnnnnnnnnnnnnnnnnnnnnnnnnnnnnnnnnnnnnnnnnnnnnnnnnnnnnnnnnnnnnnnnnnnnnnnnnnnnnnnnnnnnnnnnnnnnnnnnnnnnnnnnnnnnnnnnnnnnnnnnnnnnnnnnnnnnnnnnnnnnnnnnnnnnnnnnnnnnnnnnnnnnnnnnnnnnnnnnnnnnnnnnnnnnnnnnnnnnnnnnnnnnnnnnnnnnnnnnnnnnnnnnnnnnnnnnnnnnnnnnnnnnnnnnnnnnnnnnnnnnnnnnnnnnnnnnnnnnnnnnnnnnnnnnnnnnnnnnnnnnnnnnnnnnnnnnnnnnnnnnnnnnnnnnnnnnnnnnnnnnnnnnnnnnnnnnnnnnnnnnnnnnnnnnnnnnnnnnnnnnnnnnnnnnnnnnnnnnnnnnnnnnnnnnnnnnnnnnnnnnnnnnnnnnnnnnnnnnnnnnnnnnnnnnnnnnnnnnnnnnnnnnnnnnnnnnnnnnnnnnnnnnnnnnnnnnnnnnnnnnnnnnnnnnnnnnnnnnnnnnnnnnnnnnnnnnnnnnnnnnnnnnnnnnnnnnnnnnnnnnnnnnnnnnnnnnnnnnnnnnnnnnnnnnnnnnnnnnnnnnnnnnnnnnnnnnnnnnnnnnnnnnnnnnnnnnnnnnnnnnnnnnnnnnnnnnnnnnnnnnnnnnnnnnnnnnnnnnnnnnnnnnnnnnnnnnnnnnnnnnnnnnnnnnnnnnnnnnnnnnnnnnnnnnnnnnnnnnnnnnnnnnnnnnnnnnnnnnnnnnnnnnnnnnnnnnnnnnnnnnnnnnnnnnnnnnnnnnnnnnnnnnnnnnnnnnnnnnnnnnnnnnnnnnnnnnnnnnnnnnnnnnnnnnnnnnnnnnnnnnnnnnnnnnnnnnnnnnnnnnnnnnnnnnnnnnnnnnnnnnnnnnnnnnnnnnnnnnnnnnnnnnnnnnnnnnnnnnnnnnnnnnnnnnnnnnnnnnnnnnnnnnnnnnnnnnnnnnnnnnnnnnnnnnnnnnnnnnnnnnnnnnnnnnnnnnnnnnnnnnnnnnnnnnnnnnnnnnnnnnnnnnnnnnnnnnnnnnnnnnnnnnnnnnnnnnnnnnnnnnnnnnnnnnnnnnnnnnnnnnnnnnnnnnnnnnnnnnnnnnnnnnnnnnnnnnnnnnnnnnnnnnnnnnnnnnnnnnnnnnnnnnnnnnnnnnnnnnnnnnnnnnnnnnnnnnnnnnnnnnnnnnnnnnnnnnnnnnnnnnnnnnnnnnnnnnnnnnnnnnnnnnnnnnnnnnnnnnnnnnnnnnnnnnnnnnnnnnnnnnnnnnnnnnnnnnnnnnnnnnnnnnnnnnnnnnnnnnnnnnnnnnnnnnnnnnnnnnnnnnnnnnnnnnnnnnnnnnnnnnnnnnnnnnnnnnnnnnnnnnnnnnnnnnnnnnnnnnnnnnnnnnnnnnnnnnnnnnnnnnnnnnnnnnnnnnnnnnnnnnnnnnnnnnnnnnnnnnnnnnnnnnnnnnnnnnnnnnnnnnnnnnnnnnnnnnnnnnnnnnnnnnnnnnnnnnnnnnnnnnnnnnnnnnnnnnnnnnnnnnnnnnnnnnnnnnnnnnnnnnnnnnnnnnnnnnnnnnnnnnnnnnnnnnnnnnnnnnnnnnnnnnnnnnnnnnnnnnnnnnnnnnnnnnnnnnnnnnnnnnnnnnnnnnnnnnnnnnnnnnnnnnnnnnnnnnnnnnnnnnnnnnnnnnnnnnnnnnnnnnnnnnnnnnnnnnnnnnnnnnnnnnnnnnnnnnnnnnnnnnnnnnnnnnnnnnnnnnnnnnnnnnnnnnnnnnnnnnnnnnnnnnnnnnnnnnnnnnnnnnnnnnnnnnnnnnnnnnnnnnnnnnnnnnnnnnnnnnnnnnnnnnnnnnnnnnnnnnnnnnnnnnnnnnnnnnnnnnnnnnnnnnnnnnnnnnnnnnnnnnnnnnnnnnnnnnnnnnnnnnnnnnnnnnnnnnnnnnnnnnnnnnnnnnnnnnnnnnnnnnnnnnnnnnnnnnnnnnnnnnnnnnnnnnnnnnnnnnnnnnnnnnnnnnnnnnnnnnnnnnnnnnnnnnnnnnnnnnnnnnnnnnnnnnnnnnnnnnnnnnnnnnnnnnnnnnnnnnnnnnnnnnnnnnnnnnnnnnnnnnnnnnnnnnnnnnnnnnnnnnnnnnnnnnnnnnnnnnnnnnnnnnnnnnnnnnnnnnnnnnnnnnnnnnnnnnnnnnnnnnnnnnnnnnnnnnnnnnnnnnnnnnnnnnnnnnnnnnnnnnnnnnnnnnnnnnnnnnnnnnnnnnnnnnnnnnnnnnnnnnnnnnnnnnnnnnnnnnnnnnnnnnnnnnnnnnnnnnnnnnnnnnnnnnnnnnnnnnnnnnnnnnnnnnnnnnnnnnnnnnnnnnnnnnnnnnnnnnnnnnnnnnnnnnnnnnnnnnnnnnnnnnnnnnnnnnnnnnnnnnnnnnnnnnnnnnnnnnnnnnnnnnnnnnnnnnnnnnnnnnnnnnnnnnnnnnnnnnnnnnnnnnnnnnnnnnnnnnnnnnnnnnnnnnnnnnnnnnnnnnnnnnnnnnnnnnnnnnnnnnnnnnnnnnnnnnnnnnnnnnnnnnnnnnnnnnnnnnnnnnnnnnnnnnnnnnnnnnnnnnnnnnnnnnnnnnnnnnnnnnnnnnnnnnnnnnnnnnnnnnnnnnnnnnnnnnnnnnnnnnnnnnnnnnnnnnnnnnnnnnnnnnnnnnnnnnnnnnnnnnnnnnnnnnnnnnnnnnnnnnnnnnnnnnnnnnnnnnnnnnnnnnnnnnnnnnnnnnnnnnnnnnnnnnnnnnnnnnnnnnnnnnnnnnnnnnnnnnnnnnnnnnnnnnnnnnnnnnnnnnnnnnnnnnnnnnnnnnnnnnnnnnnnnnnnnnnnnnnnnnnnnnnnnnnnnnnnnnnnnnnnnnnnnnnnnnnnnnnnnnnnnnnnnnnnnnnnnnnnnnnnnnnnnnnnnnnnnnnnnnnnnnnnnnnnnnnnnnnnnnnnnnnnnnnnnnnnnnnnnnnnnnnnnnnnnnnnnnnnnnnnnnnnnnnnnnnnnnnnnnnnnnnnnnnnnnnnnnnnnnnnnnnnnnnnnnnnnnnnnnnnnnnnnnnnnnnnnnnnnnnnnnnnnnnnnnnnnnnnnnnnnnnnnnnnnnnnnnnnnnnnnnnnnnnnnnnnnnnnnnnnnnnnnnnnnnnnnnnnnnnnnnnnnnnnnnnnnnnnnnnnnnnnnnnnnnnnnnnnnnnnnnnnnnnnnnnnnnnnnnnnnnnnnnnnnnnnnnnnnnnnnnnnnnnnnnnnnnnnnnnnnnnnnnnnnnnnnnnnnnnnnnnnnnnnnnnnnnnnnnnnnnnnnnnnnnnnnnnnnnnnnnnnnnnnnnnnnnnnnnnnnnnnnnnnnnnnnnnnnnnnnnnnnnnnnnnnnnnnnnnnnnnnnnnnnnnnnnnnnnnnnnnnnnnnnnnnnnnnnnnnnnnnnnnnnnnnnnnnnnnnnnnnnnnnnnnnnnnnnnnnnnnnnnnnnnnnnnnnnnnnnnnnnnnnnnnnnnnnnnnnnnnnnnnnnnnnnnnnnnnnnnnnnnnnnnnnnnnnnnnnnnnnnnnnnnnnnnnnnnnnnnnnnnnnnnnnnnnnnnnnnnnnnnnnnnnnnnnnnnnnnnnnnnnnnnnnnnnnnnnnnnnnnnnnnnnnnnnnnnnnnnnnnnnnnnnnnnnnnnnnnnnnnnnnnnnnnnnnnnnnnnnnnnnnnnnnnnnnnnnnnnnnnnnnnnnnnnnnnnnnnnnnnnnnnnnnnnnnnnnnnnnnnnnnnnnnnnnnnnnnnnnnnnnnnnnnnnnnnnnnnnnnnnnnnnnnnnnnnnnnnnnnnnnnnnnnnnnnnnnnnnnnnnnnnnnnnnnnnnnnnnnnnnnnnnnnnnnnnnnnnnnnnnnnnnnnnnnnnnnnnnnnnnnnnnnnnnnnnnnnnnnnnnnnnnnnnnnnnnnnnnnnnnnnnnnnnnnnnnnnnnnnnnnnnnnnnnnnnnnnnnnnnnnnnnnnnnnnnnnnnnnnnnnnnnnnnnnnnnnnnnnnnnnnnnnnnnnnnnnnnnnnnnnnnnnnnnnnnnnnnnnnnnnnnnnnnnnnnnnnnnnnnnnnnnnnnnnnnnnnnnnnnnnnnnnnnnnnnnnnnnnnnnnnnnnnnnnnnnnnnnnnnnnnnnnnnnnnnnnnnnnnnnnnnnnnnnnnnnnnnnnnnnnnnnnnnnnnnnnnnnnnnnnnnnnnnnnnnnnnnnnnnnnnnnnnnnnnnnnnnnnnnnnnnnnnnnnnnnnnnnnnnnnnnnnnnnnnnnnnnnnnnnnnnnnnnnnnnnnnnnnnnnnnnnnnnnnnnnnnnnnnnnnnnnnnnnnnnnnnnnnnnnnnnnnnnnnnnnnnnnnnnnnnnnnnnnnnnnnnnnnnnnnnnnnnnnnnnnnnnnnnnnnnnnnnnnnnnnnnnnnnnnnnnnnnnnnnnnnnnnnnnnnnnnnnnnnnnnnnnnnnnnnnnnnnnnnnnnnnnnnnnnnnnnnnnnnnnnnnnnnnnnnnnnnnnnnnnnnnnnnnnnnnnnnnnnnnnnnnnnnnnnnnnnnnnnnnnnnnnnnnnnnnnnnnnnnnnnnnnnnnnnnnnnnnnnnnnnnnnnnnnnnnnnnnnnnnnnnnnnnnnnnnnnnnnnnnnnnnnnnnnnnnnnnnnnnnnnnnnnnnnnnnnnnnnnnnnnnnnnnnnnnnnnnnnnnnnnnnnnnnnnnnnnnnnnnnnnnnnnnnnnnnnnnnnnnnnnnnnnnnnnnnnnnnnnnnnnnnnnnnnnnnnnnnnnnnnnnnnnnnnnnnnnnnnnnnnnnnnnnnnnnnnnnnnnnnnnnnnnnnnnnnnnnnnnnnnnnnnnnnnnnnnnnnnnnnnnnnnnnnnnnnnnnnnnnnnnnnnnnnnnnnnnnnnnnnnnnnnnnnnnnnnnnnnnnnnnnnnnnnnnnnnnnnnnnnnnnnnnnnnnnnnnnnnnnnnnnnnnnnnnnnnnnnnnnnnnnnnnnnnnnnnnnnnnnnnnnnnnnnnnnnnnnnnnnnnnnnnnnnnnnnnnnnnnnnnnnnnnnnnnnnnnnnnnnnnnnnnnnnnnnnnnnnnnnnnnnnnnnnnnnnnnnnnnnnnnnnnnnnnnnnnnnnnnnnnnnnnnnnnnnnnnnnnnnnnnnnnnnnnnnnnnnnnnnnnnnnnnnnnnnnnnnnnnnnnnnnnnnnnnnnnnnnnnnnnnnnnnnnnnnnnnnnnnnnnnnnnnnnnnnnnnnnnnnnnnnnnnnnnnnnnnnnnnnnnnnnnnnnnnnnnnnnnnnnnnnnnnnnnnnnnnnnnnnnnnnnnnnnnnnnnnnnnnnnnnnnnnnnnnnnnnnnnnnnnnnnnnnnnnnnnnnnnnnnnnnnnnnnnnnnnnnnnnnnnnnnnnnnnnnnnnnnnnnnnnnnnnnnnnnnnnnnnnnnnnnnnnnnnnnnnnnnnnnnnnnnnnnnnnnnnnnnnnnnnnnnnnnnnnnnnnnnnnnnnnnnnnnnnnnnnnnnnnnnnnnnnnnnnnnnnnnnnnnnnnnnnnnnnnnnnnnnnnnnnnnnnnnnnnnnnnnnnnnnnnnnnnnnnnnnnnnnnnnnnnnnnnnnnnnnnnnnnnnnnnnnnnnnnnnnnnnnnnnnnnnnnnnnnnnnnnnnnnnnnnnnnnnnnnnnnnnnnnnnnnnnnnnnnnnnnnnnnnnnnnnnnnnnnnnnnnnnnnnnnnnnnnnnnnnnnnnnnnnnnnnnnnnnnnnnnnnnnnnnnnnnnnnnnnnnnnnnnnnnnnnnnnnnnnnnnnnnnnnnnnnnnnnnnnnnnnnnnnnnnnnnnnnnnnnnnnnnnnnnnnnnnnnnnnnnnnnnnnnnnnnnnnnnnnnnnnnnnnnnnnnnnnnnnnnnnnnnnnnnnnnnnnnnnnnnnnnnnnnnnnnnnnnnnnnnnnnnnnnnnnnnnnnnnnnnnnnnnnnnnnnnnnnnnnnnnnnnnnnnnnnnnnnnnnnnnnnnnnnnnnnnnnnnnnnnnnnnnnnnnnnnnnnnnnnnnnnnnnnnnnnnnnnnnnnnnnnnnnnnnnnnnnnnnnnnnnnnnnnnnnnnnnnnnnnnnnnnnnnnnnnnnnnnnnnnnnnnnnnnnnnnnnnnnnnnnnnnnnnnnnnnnnnnnnnnnnnnnnnnnnnnnnnnnnnnnnnnnnnnnnnnnnnnnnnnnnnnnnnnnnnnnnnnnnnnnnnnnnnnnnnnnnnnnnnnnnnnnnnnnnnnnnnnnnnnnnnnnnnnnnnnnnnnnnnnnnnnnnnnnnnnnnnnnnnnnnnnnnnnnnnnnnnnnnnnnnnnnnnnnnnnnnnnnnnnnnnnnnnnnnnnnnnnnnnnnnnnnnnnnnnnnnnnnnnnnnnnnnnnnnnnnnnnnnnnnnnnnnnnnnnnnnnnnnnnnnnnnnnnnnnnnnnnnnnnnnnnnnnnnnnnnnnnnnnnnnnnnnnnnnnnnnnnnnnnnnnnnnnnnnnnnnnnnnnnnnnnnnnnnnnnnnnnnnnnnnnnnnnnnnnnnnnnnnnnnnnnnnnnnnnnnnnnnnnnnnnnnnnnnnnnnnnnnnnnnnnnnnnnnnnnnnnnnnnnnnnnnnnnnnnnnnnnnnnnnnnnnnnnnnnnnnnnnnnnnnnnnnnnnnnnnnnnnnnnnnnnnnnnnnnnnnnnnnnnnnnnnnnnnnnnnnnnnnnnnnnnnnnnnnnnnnnnnnnnnnnnnnnnnnnnnnnnnnnnnnnnnnnnnnnnnnnnnnnnnnnnnnnnnnnnnnnnnnnnnnnnnnnnnnnnnnnnnnnnnnnnnnnnnnnnnnnnnnnnnnnnnnnnnnnnnnnnnnnnnnnnnnnnnnnnnnnnnnnnnnnnnnnnnnnnnnnnnnnnnnnnnnnnnnnnnnnnnnnnnnnnnnnnnnnnnnnnnnnnnnnnnnnnnnnnnnnnnnnnnnnnnnnnnnnnnnnnnnnnnnnnnnnnnnnnnnnnnnnnnnnnnnnnnnnnnnnnnnnnnnnnnnnnnnnnnnnnnnnnnnnnnnnnnnnnnnnnnnnnnnnnnnnnnnnnnnnnnnnnnnnnnnnnnnnnnnnnnnnnnnnnnnnnnnnnnnnnnnnnnnnnnnnnnnnnnnnnnnnnnnnnnnnnnnnnnnnnnnnnnnnnnnnnnnnnnnnnnnnnnnnnnnnnnnnnnnnnnnnnnnnnnnnnnnnnnnnnnnnnnnnnnnnnnnnnnnnnnnnnnnnnnnnnnnnnnnnnnnnnnnnnnnnnnnnnnnnnnnnnnnnnnnnnnnnnnnnnnnnnnnnnnnnnnnnnnnnnnnnnnnnnnnnnnnnnnnnnnnnnnnnnnnnnnnnnnnnnnnnnnnnnnnnnnnnnnnnnnnnnnnnnnnnnnnnnnnnnnnnnnnnnnnnnnnnnnnnnnnnnnnnnnnnnnnnnnnnnnnnnnnnnnnnnnnnnnnnnnnnnnnnnnnnnnnnnnnnnnnnnnnnnnnnnnnnnnnnnnnnnnnnnnnnnnnnnnnnnnnnnnnnnnnnnnnnnnnnnnnnnnnnnnnnnnnnnnnnnnnnnnnnnnnnnnnnnnnnnnnnnnnnnnnnnnnnnnnnnnnnnnnnnnnnnnnnnnnnnnnnnnnnnnnnnnnnnnnnnnnnnnnnnnnnnnnnnnnnnnnnnnnnnnnnnnnnnnnnnnnnnnnnnnnnnnnnnnnnnnnnnnnnnnnnnnnnnnnnnnnnnnnnnnnnnnnnnnnnnnnnnnnnnnnnnnnnnnnnnnnnnnnnnnnnnnnnnnnnnnnnnnnnnnnnnnnnnnnnnnnnnnnnnnnnnnnnnnnnnnnnnnnnnnnnnnnnnnnnnnnnnnnnnnnnnnnnnnnnnnnnnnnnnnnnnnnnnnnnnnnnnnnnnnnnnnnnnnnnnnnnnnnnnnnnnnnnnnnnnnnnnnnnnnnnnnnnnnnnnnnnnnnnnnnnnnnnnnnnnnnnnnnnnnnnnnnnnnnnnnnnnnnnnnnnnnnnnnnnnnnnnnnnnnnnnnnnnnnnnnnnnnnnnnnnnnnnnnnnnnnnnnnnnnnnnnnnnnnnnnnnnnnnnnnnnnnnnnnnnnnnnnnnnnnnnnnnnnnnnnnnnnnnnnnnnnnnnnnnnnnnnnnnnnnnnnnnnnnnnnnnnnnnnnnnnnnnnnnnnnnnnnnnnnnnnnnnnnnnnnnnnnnnnnnnnnnnnnnnnnnnnnnnnnnnnnnnnnnnnnnnnnnnnnnnnnnnnnnnnnnnnnnnnnnnnnnnnnnnnnnnnnnnnnnnnnnnnnnnnnnnnnnnnnnnnnnnnnnnnnnnnnnnnnnnnnnnnnnnnnnnnnnnnnnnnnnnnnnnnnnnnnnnnnnnnnnnnnnnnnnnnnnnnnnnnnnnnnnnnnnnnnnnnnnnnnnnnnnnnnnnnnnnnnnnnnnnnnnnnnnnnnnnnnnnnnnnnnnnnnnnnnnnnnnnnnnnnnnnnnnnnnnnnnnnnnnnnnnnnnnnnnnnnnnnnnnnnnnnnnnnnnnnnnnnnnnnnnnnnnnnnnnnnnnnnnnnnnnnnnnnnnnnnnnnnnnnnnnnnnnnnnnnnnnnnnnnnnnnnnnnnnnnnnnnnnnnnnnnnnnnnnnnnnnnnnnnnnnnnnnnnnnnnnnnnnnnnnnnnnnnnnnnnnnnnnnnnnnnnnnnnnnnnnnnnnnnnnnnnnnnnnnnnnnnnnnnnnnnnnnnnnnnnnnnnnnnnnnnnnnnnnnnnnnnnnnnnnnnnnnnnnnnnnnnnnnnnnnnnnnnnnnnnnnnnnnnnnnnnnnnnnnnnnnnnnnnnnnnnnnnnnnnnnnnnnnnnnnnnnnnnnnnnnnnnnnnnnnnnnnnnnnnnnnnnnnnnnnnnnnnnnnnnnnnnnnnnnnnnnnnnnnnnnnnnnnnnnnnnnnnnnnnnnnnnnnnnnnnnnnnnnnnnnnnnnnnnnnnnnnnnnnnnnnnnnnnnnnnnnnnnnnnnnnnnnnnnnnnnnnnnnnnnnnnnnnnnnnnnnnnnnnnnnnnnnnnnnnnnnnnnnnnnnnnnnnnnnnnnnnnnnnnnnnnnnnnnnnnnnnnnnnnnnnnnnnnnnnnnnnnnnnnnnnnnnnnnnnnnnnnnnnnnnnnnnnnnnnnnnnnnnnnnnnnnnnnnnnnnnnnnnnnnnnnnnnnnnnnnnnnnnnnnnnnnnnnnnnnnnnnnnnnnnnnnnnnnnnnnnnnnnnnnnnnnnnnnnnnnnnnnnnnnnnnnnnnnnnnnnnnnnnnnnnnnnnnnnnnnnnnnnnnnnnnnnnnnnnnnnnnnnnnnnnnnnnnnnnnnnnnnnnnnnnnnnnnnnnnnnnnnnnnnnnnnnnnnnnnnnnnnnnnnnnnnnnnnnnnnnnnnnnnnnnnnnnnnnnnnnnnnnnnnnnnnnnnnnnnnnnnnnnnnnnnnnnnnnnnnnnnnnnnnnnnnnnnnnnnnnnnnnnnnnnnnnnnnnnnnnnnnnnnnnnnnnnnnnnnnnnnnnnnnnnnnnnnnnnnnnnnnnnnnnnnnnnnnnnnnnnnnnnnnnnnnnnnnnnnnnnnnnnnnnnnnnnnnnnnnnnnnnnnnnnnnnnnnnnnnnnnnnnnnnnnnnnnnnnnnnnnnnnnnnnnnnnnnnnnnnnnnnnnnnnnnnnnnnnnnnnnnnnnnnnnnnnnnnnnnnnnnnnnnnnnnnnnnnnnnnnnnnnnnnnnnnnnnnnnnnnnnnnnnnnnnnnnnnnnnnnnnnnnnnnnnnnnnnnnnnnnnnnnnnnnnnnnnnnnnnnnnnnnnnnnnnnnnnnnnnnnnnnnnnnnnnnnnnnnnnnnnnnnnnnnnnnnnnnnnnnnnnnnnnnnnnnnnnnnnnnnnnnnnnnnnnnnnnnnnnnnnnnnnnnnnnnnnnnnnnnnnnnnnnnnnnnnnnnnnnnnnnnnnnnnnnnnnnnnnnnnnnnnnnnnnnnnnnnnnnnnnnnnnnnnnnnnnnnnnnnnnnnnnnnnnnnnnnnnnnnnnnnnnnnnnnnnnnnnnnnnnnnnnnnnnnnnnnnnnnnnnnnnnnnnnnnnnnnnnnnnnnnnnnnnnnnnnnnnnnnnnnnnnnnnnnnnnnnnnnnnnnnnnnnnnnnnnnnnnnnnnnnnnnnnnnnnnnnnnnnnnnnnnnnnnnnnnnnnnnnnnnnnnnnnnnnnnnnnnnnnnnnnnnnnnnnnnnnnnnnnnnnnnnnnnnnnnnnnnnnnnnnnnnnnnnnnnnnnnnnnnnnnnnnnnnnnnnnnnnnnnnnnnnnnnnnnnnnnnnnnnnnnnnnnnnnnnnnnnnnnnnnnnnnnnnnnnnnnnnnnnnnnnnnnnnnnnnnnnnnnnnnnnnnnnnnnnnnnnnnnnnnnnnnnnnnnnnnnnnnnnnnnnnnnnnnnnnnnnnnnnnnnnnnnnnnnnnnnnnnnnnnnnnnnnnnnnnnnnnnnnnnnnnnnnnnnnnnnnnnnnnnnnnnnnnnnnnnnnnnnnnnnnnnnnnnnnnnnnnnnnnnnnnnnnnnnnnnnnnnnnnnnnnnnnnnnnnnnnnnnnnnnnnnnnnnnnnnnnnnnnnnnnnnnnnnnnnnnnnnnnnnnnnnnnnnnnnnnnnnnnnnnnnnnnnnnnnnnnnnnnnnnnnnnnnnnnnnnnnnnnnnnnnnnnnnnnnnnnnnnnnnnnnnnnnnnnnnnnnnnnnnnnnnnnnnnnnnnnnnnnnnnnnnnnnnnnnnnnnnnnnnnnnnnnnnnnnnnnnnnnnnnnnnnnnnnnnnnnnnnnnnnnnnnnnnnnnnnnnnnnnnnnnnnnnnnnnnnnnnnnnnnnnnnnnnnnnnnnnnnnnnnnnnnnnnnnnnnnnnnnnnnnnnnnnnnnnnnnnnnnnnnnnnnnnnnnnnnnnnnnnnnnnnnnnnnnnnnnnnnnnnnnnnnnnnnnnnnnnnnnnnnnnnnnnnnnnnnnnnnnnnnnnnnnnnnnnnnnnnnnnnnnnnnnnnnnnnnnnnnnnnnnnnnnnnnnnnnnnnnnnnnnnnnnnnnnnnnnnnnnnnnnnnnnnnnnnnnnnnnnnnnnnnnnnnnnnnnnnnnnnnnnnnnnnnnnnnnnnnnnnnnnnnnnnnnnnnnnnnnnnnnnnnnnnnnnnnnnnnnnnnnnnnnnnnnnnnnnnnnnnnnnnnnnnnnnnnnnnnnnnnnnnnnnnnnnnnnnnnnnnnnnnnnnnnnnnnnnnnnnnnnnnnnnnnnnnnnnnnnnnnnnnnnnnnnnnnnnnnnnnnnnnnnnnnnnnnnnnnnnnnnnnnnnnnnnnnnnnnnnnnnnnnnnnnnnnnnnnnnnnnnnnnnnnnnnnnnnnnnnnnnnnnnnnnnnnnnnnnnnnnnnnnnnnnnnnnnnnnnnnnnnnnnnnnnnnnnnnnnnnnnnnnnnnnnnnnnnnnnnnnnnnnnnnnnnnnnnnnnnnnnnnnnnnnnnnnnnnnnnnnnnnnnnnnnnnnnnnnnnnnnnnnnnnnnnnnnnnnnnnnnnnnnnnnnnnnnnnnnnnnnnnnnnnnnnnnnnnnnnnnnnnnnnnnnnnnnnnnnnnnnnnnnnnnnnnnnnnnnnnnnnnnnnnnnnnnnnnnnnnnnnnnnnnnnnnnnnnnnnnnnnnnnnnnnnnnnnnnnnnnnnnnnnnnnnnnnnnnnnnnnnnnnnnnnnnnnnnnnnnnnnnnnnnnnnnnnnnnnnnnnnnnnnnnnnnnnnnnnnnnnnnnnnnnnnnnnnnnnnnnnnnnnnnnnnnnnnnnnnnnnnnnnnnnnnnnnnnnnnnnnnnnnnnnnnnnnnnnnnnnnnnnnnnnnnnnnnnnnnnnnnnnnnnnnnnnnnnnnnnnnnnnnnnnnnnnnnnnnnnnnnnnnnnnnnnnnnnnnnnnnnnnnnnnnnnnnnnnnnnnnnnnnnnnnnnnnnnnnnnnnnnnnnnnnnnnnnnnnnnnnnnnnnnnnnnnnnnnnnnnnnnnnnnnnnnnnnnnnnnnnnnnnnnnnnnnnnnnnnnnnnnnnnnnnnnnnnnnnnnnnnnnnnnnnnnnnnnnnnnnnnnnnnnnnnnnnnnnnnnnnnnnnnnnnnnnnnnnnnnnnnnnnnnnnnnnnnnnnnnnnnnnnnnnnnnnnnnnnnnnnnnnnnnnnnnnnnnnnnnnnnnnnnnnnnnnnnnnnnnnnnnnnnnnnnnnnnnnnnnnnnnnnnnnnnnnnnnnnnnnnnnnnnnnnnnnnnnnnnnnnnnnnnnnnnnnnnnnnnnnnnnnnnnnnnnnnnnnnnnnnnnnnnnnnnnnnnnnnnnnnnnnnnnnnnnnnnnnnnnnnnnnnnnnnnnnnnnnnnnnnnnnnnnnnnnnnnnnnnnnnnnnnnnnnnnnnnnnnnnnnnnnnnnnnnnnnnnnnnnnnnnnnnnnnnnnnnnnnnnnnnnnnnnnnnnnnnnnnnnnnnnnnnnnnnnnnnnnnnnnnnnnnnnnnnnnnnnnnnnnnnnnnnnnnnnnnnnnnnnnnnnnnnnnnnnnnnnnnnnnnnnnnnnnnnnnnnnnnnnnnnnnnnnnnnnnnnnnnnnnnnnnnnnnnnnnnnnnnnnnnnnnnnnnnnnnnnnnnnnnnnnnnnnnnnnnnnnnnnnnnnnnnnnnnnnnnnnnnnnnnnnnnnnnnnnnnnnnnnnnnnnnnnnnnnnnnnnnnnnnnnnnnnnnnnnnnnnnnnnnnnnnnnnnnnnnnnnnnnnnnnnnnnnnnnnnnnnnnnnnnnnnnnnnnnnnnnnnnnnnnnnnnnnnnnnnnnnnnnnnnnnnnnnnnnnnnnnnnnnnnnnnnnnnnnnnnnnnnnnnnnnnnnnnnnnnnnnnnnnnnnnnnnnnnnnnnnnnnnnnnnnnnnnnnnnnnnnnnnnnnnnnnnnnnnnnnnnnnnnnnnnnnnnnnnnnnnnnnnnnnnnnnnnnnnnnnnnnnnnnnnnnnnnnnnnnnnnnnnnnnnnnnnnnnnnnnnnnnnnnnnnnnnnnnnnnnnnnnnnnnnnnnnnnnnnnnnnnnnnnnnnnnnnnnnnnnnnnnnnnnnnnnnnnnnnnnnnnnnnnnnnnnnnnnnnnnnnnnnnnnnnnnnnnnnnnnnnnnnnnnnnnnnnnnnnnnnnnnnnnnnnnnnnnnnnnnnnnnnnnnnnnnnnnnnnnnnnnnnnnnnnnnnnnnnnnnnnnnnnnnnnnnnnnnnnnnnnnnnnnnnnnnnnnnnnnnnnnnnnnnnnnnnnnnnnnnnnnnnnnnnnnnnnnnnnnnnnnnnnnnnnnnnnnnnnnnnnnnnnnnnnnnnnnnnnnnnnnnnnnnnnnnnnnnnnnnnnnnnnnnnnnnnnnnnnnnnnnnnnnnnnnnnnnnnnnnnnnnnnnnnnnnnnnnnnnnnnnnnnnnnnnnnnnnnnnnnnnnnnnnnnnnnnnnnnnnnnnnnnnnnnnnnnnnnnnnnnnnnnnnnnnnnnnnnnnnnnnnnnnnnnnnnnnnnnnnnnnnnnnnnnnnnnnnnnnnnnnnnnnnnnnnnnnnnnnnnnnnnnnnnnnnnnnnnnnnnnnnnnnnnnnnnnnnnnnnnnnnnnnnnnnnnnnnnnnnnnnnnnnnnnnnnnnnnnnnnnnnnnnnnnnnnnnnnnnnnnnnnnnnnnnnnnnnnnnnnnnnnnnnnnnnnnnnnnnnnnnnnnnnnnnnnnnnnnnnnnnnnnnnnnnnnnnnnnnnnnnnnnnnnnnnnnnnnnnnnnnnnnnnnnnnnnnnnnnnnnnnnnnnnnnnnnnnnnnnnnnnnnnnnnnnnnnnnnnnnnnnnnnnnnnnnnnnnnnnnnnnnnnnnnnnnnnnnnnnnnnnnnnnnnnnnnnnnnnnnnnnnnnnnnnnnnnnnnnnnnnnnnnnnnnnnnnnnnnnnnnnnnnnnnnnnnnnnnnnnnnnnnnnnnnnnnnnnnnnnnnnnnnnnnnnnnnnnnnnnnnnnnnnnnnnnnnnnnnnnnnnnnnnnnnnnnnnnnnnnnnnnnnnnnnnnnnnnnnnnnnnnnnnnnnnnnnnnnnnnnnnnnnnnnnnnnnnnnnnnnnnnnnnnnnnnnnnnnnnnnnnnnnnnnnnnnnnnnnnnnnnnnnnnnnnnnnnnnnnnnnnnnnnnnnnnnnnnnnnnnnnnnnnnnnnnnnnnnnnnnnnnnnnnnnnnnnnnnnnnnnnnnnnnnnnnnnnnnnnnnnnnnnnnnnnnnnnnnnnnnnnnnnnnnnnnnnnnnnnnnnnnnnnnnnnnnnnnnnnnnnnnnnnnnnnnnnnnnnnnnnnnnnnnnnnnnnnnnnnnnnnnnnnnnnnnnnnnnnnnnnnnnnnnnnnnnnnnnnnnnnnnnnnnnnnnnnnnnnnnnnnnnnnnnnnnnnnnnnnnnnnnnnnnnnnnnnnnnnnnnnnnnnnnnnnnnnnnnnnnnnnnnnnnnnnnnnnnnnnnnnnnnnnnnnnnnnnnnnnnnnnnnnnnnnnnnnnnnnnnnnnnnnnnnnnnnnnnnnnnnnnnnnnnnnnnnnnnnnnnnnnnnnnnnnnnnnnnnnnnnnnnnnnnnnnnnnnnnnnnnnnnnnnnnnnnnnnnnnnnnnnnnnnnnnnnnnnnnnnnnnnnnnnnnnnnnnnnnnnnnnnnnnnnnnnnnnnnnnnnnnnnnnnnnnnnnnnnnnnnnnnnnnnnnnnnnnnnnnnnnnnnnnnnnnnnnnnnnnnnnnnnnnnnnnnnnnnnnnnnnnnnnnnnnnnnnnnnnnnnnnnnnnnnnnnnnnnnnnnnnnnnnnnnnnnnnnnnnnnnnnnnnnnnnnnnnnnnnnnnnnnnnnnnnnnnnnnnnnnnnnnnnnnnnnnnnnnnnnnnnnnnnnnnnnnnnnnnnnnnnnnnnnnnnnnnnnnnnnnnnnnnnnnnnnnnnnnnnnnnnnnnnnnnnnnnnnnnnnnnnnnnnnnnnnnnnnnnnnnnnnnnnnnnnnnnnnnnnnnnnnnnnnnnnnnnnnnnnnnnnnnnnnnnnnnnnnnnnnnnnnnnnnnnnnnnnnnnnnnnnnnnnnnnnnnnnnnnnnnnnnnnnnnnnnnnnnnnnnnnnnnnnnnnnnnnnnnnnnnnnnnnnnnnnnnnnnnnnnnnnnnnnnnnnnnnnnnnnnnnnnnnnnnnnnnnnnnnnnnnnnnnnnnnnnnnnnnnnnnnnnnnnnnnnnnnnnnnnnnnnnnnnnnnnnnnnnnnnnnnnnnnnnnnnnnnnnnnnnnnnnnnnnnnnnnnnnnnnnnnnnnnnnnnnnnnnnnnnnnnnnnnnnnnnnnnnnnnnnnnnnnnnnnnnnnnnnnnnnnnnnnnnnnnnnnnnnnnnnnnnnnnnnnnnnnnnnnnnnnnnnnnnnnnnnnnnnnnnnnnnnnnnnnnnnnnnnnnnnnnnnnnnnnnnnnnnnnnnnnnnnnnnnnnnnnnnnnnnnnnnnnnnnnnnnnnnnnnnnnnnnnnnnnnnnnnnnnnnnnnnnnnnnnnnnnnnnnnnnnnnnnnnnnnnnnnnnnnnnnnnnnnnnnnnnnnnnnnnnnnnnnnnnnnnnnnnnnnnnnnnnnnnnnnnnnnnnnnnnnnnnnnnnnnnnnnnnnnnnnnnnnnnnnnnnnnnnnnnnnnnnnnnnnnnnnnnnnnnnnnnnnnnnnnnnnnnnnnnnnnnnnnnnnnnnnnnnnnnnnnnnnnnnnnnnnnnnnnnnnnnnnnnnnnnnnnnnnnnnnnnnnnnnnnnnnnnnnnnnnnnnnnnnnnnnnnnnnnnnnnnnnnnnnnnnnnnnnnnnnnnnnnnnnnnnnnnnnnnnnnnnnnnnnnnnnnnnnnnnnnnnnnnnnnnnnnnnnnnnnnnnnnnnnnnnnnnnnnnnnnnnnnnnnnnnnnnnnnnnnnnnnnnnnnnnnnnnnnnnnnnnnnnnnnnnnnnnnnnnnnnnnnnnnnnnnnnnnnnnnnnnnnnnnnnnnnnnnnnnnnnnnnnnnnnnnnnnnnnnnnnnnnnnnnnnnnnnnnnnnnnnnnnnnnnnnnnnnnnnnnnnnnnnnnnnnnnnnnnnnnnnnnnnnnnnnnnnnnnnnnnnnnnnnnnnnnnnnnnnnnnnnnnnnnnnnnnnnnnnnnnnnnnnnnnnnnnnnnnnnnnnnnnnnnnnnnnnnnnnnnnnnnnnnnnnnnnnnnnnnnnnnnnnnnnnnnnnnnnnnnnnnnnnnnnnnnnnnnnnnnnnnnnnnnnnnnnnnnnnnnnnnnnnnnnnnnnnnnnnnnnnnnnnnnnnnnnnnnnnnnnnnnnnnnnnnnnnnnnnnnnnnnnnnnnnnnnnnnnnnnnnnnnnnnnnnnnnnnnnnnnnnnnnnnnnnnnnnnnnnnnnnnnnnnnnnnnnnnnnnnnnnnnnnnnnnnnnnnnnnnnnnnnnnnnnnnnnnnnnnnnnnnnnnnnnnnnnnnnnnnnnnnnnnnnnnnnnnnnnnnnnnnnnnnnnnnnnnnnnnnnnnnnnnnnnnnnnnnnnnnnnnnnnnnnnnnnnnnnnnnnnnnnnnnnnnnnnnnnnnnnnnnnnnnnnnnnnnnnnnnnnnnnnnnnnnnnnnnnnnnnnnnnnnnnnnnnnnnnnnnnnnnnnnnnnnnnnnnnnnnnnnnnnnnnnnnnnnnnnnnnnnnnnnnnnnnnnnnnnnnnnnnnnnnnnnnnnnnnnnnnnnnnnnnnnnnnnnnnnnnnnnnnnnnnnnnnnnnnnnnnnnnnnnnnnnnnnnnnnnnnnnnnnnnnnnnnnnnnnnnnnnnnnnnnnnnnnnnnnnnnnnnnnnnnnnnnnnnnnnnnnnnnnnnnnnnnnnnnnnnnnnnnnnnnnnnnnnnnnnnnnnnnnnnnnnnnnnnnnnnnnnnnnnnnnnnnnnnnnnnnnnnnnnnnnnnnnnnnnnnnnnnnnnnnnnnnnnnnnnnnnnnnnnnnnnnnnnnnnnnnnnnnnnnnnnnnnnnnnnnnnnnnnnnnnnnnnnnnnnnnnnnnnnnnnnnnnnnnnnnnnnnnnnnnnnnnnnnnnnnnnnnnnnnnnnnnnnnnnnnnnnnnnnnnnnnnnnnnnnnnnnnnnnnnnnnnnnnnnnnnnnnnnnnnnnnnnnnnnnnnnnnnnnnnnnnnnnnnnnnnnnnnnnnnnnnnnnnnnnnnnnnnnnnnnnnnnnnnnnnnnnnnnnnnnnnnnnnnnnnnnnnnnnnnnnnnnnnnnnnnnnnnnnnnnnnnnnnnnnnnnnnnnnnnnnnnnnnnnnnnnnnnnnnnnnnnnnnnnnnnnnnnnnnnnnnnnnnnnnnnnnnnnnnnnnnnnnnnnnnnnnnnnnnnnnnnnnnnnnnnnnnnnnnnnnnnnnnnnnnnnnnnnnnnnnnnnnnnnnnnnnnnnnnnnnnnnnnnnnnnnnnnnnnnnnnnnnnnnnnnnnnnnnnnnnnnnnnnnnnnnnnnnnnnnnnnnnnnnnnnnnnnnnnnnnnnnnnnnnnnnnnnnnnnnnnnnnnnnnnnnnnnnnnnnnnnnnnnnnnnnnnnnnnnnnnnnnnnnnnnnnnnnnnnnnnnnnnnnnnnnnnnnnnnnnnnnnnnnnnnnnnnnnnnnnnnnnnnnnnnnnnnnnnnnnnnnnnnnnnnnnnnnnnnnnnnnnnnnnnnnnnnnnnnnnnnnnnnnnnnnnnnnnnnnnnnnnnnnnnnnnnnnnnnnnnnnnnnnnnnnnnnnnnnnnnnnnnnnnnnnnnnnnnnnnnnnnnnnnnnnnnnnnnnnnnnnnnnnnnnnnnnnnnnnnnnnnnnnnnnnnnnnnnnnnnnnnnnnnnnnnnnnnnnnnnnnnnnnnnnnnnnnnnnnnnnnnnnnnnnnnnnnnnnnnnnnnnnnnnnnnnnnnnnnnnnnnnnnnnnnnnnnnnnnnnnnnnnnnnnnnnnnnnnnnnnnnnnnnnnnnnnnnnnnnnnnnnnnnnnnnnnnnnnnnnnnnnnnnnnnnnnnnnnnnnnnnnnnnnnnnnnnnnnnnnnnnnnnnnnnnnnnnnnnnnnnnnnnnnnnnnnnnnnnnnnnnnnnnnnnnnnnnnnnnnnnnnnnnnnnnnnnnnnnnnnnnnnnnnnnnnnnnnnnnnnnnnnnnnnnnnnnnnnnnnnnnnnnnnnnnnnnnnnnnnnnnnnnnnnnnnnnnnnnnnnnnnnnnnnnnnnnnnnnnnnnnnnnnnnnnnnnnnnnnnnnnnnnnnnnnnnnnnnnnnnnnnnnnnnnnnnnnnnnnnnnnnnnnnnnnnnnnnnnnnnnnnnnnnnnnnnnnnnnnnnnnnnnnnnnnnnnnnnnnnnnnnnnnnnnnnnnnnnnnnnnnnnnnnnnnnnnnnnnnnnnnnnnnnnnnnnnnnnnnnnnnnnnnnnnnnnnnnnnnnnnnnnnnnnnnnnnnnnnnnnnnnnnnnnnnnnnnnnnnnnnnnnnnnnnnnnnnnnnnnnnnnnnnnnnnnnnnnnnnnnnnnnnnnnnnnnnnnnnnnnnnnnnnnnnnnnnnnnnnnnnnnnnnnnnnnnnnnnnnnnnnnnnnnnnnnnnnnnnnnnnnnnnnnnnnnnnnnnnnnnnnnnnnnnnnnnnnnnnnnnnnnnnnnnnnnnnnnnnnnnnnnnnnnnnnnnnnnnnnnnnnnnnnnnnnnnnnnnnnnnnnnnnnnnnnnnnnnnnnnnnnnnnnnnnnnnnnnnnnnnnnnnnnnnnnnnnnnnnnnnnnnnnnnnnnnnnnnnnnnnnnnnnnnnnnnnnnnnnnnnnnnnnnnnnnnnnnnnnnnnnnnnnnnnnnnnnnnnnnnnnnnnnnnnnnnnnnnnnnnnnnnnnnnnnnnnnnnnnnnnnnnnnnnnnnnnnnnnnnnnnnnnnnnnnnnnnnnnnnnnnnnnnnnnnnnnnnnnnnnnnnnnnnnnnnnnnnnnnnnnnnnnnnnnnnnnnnnnnnnnnnnnnnnnnnnnnnnnnnnnnnnnnnnnnnnnnnnnnnnnnnnnnnnnnnnnnnnnnnnnnnnnnnnnnnnnnnnnnnnnnnnnnnnnnnnnnnnnnnnnnnnnnnnnnnnnnnnnnnnnnnnnnnnnnnnnnnnnnnnnnnnnnnnnnnnnnnnnnnnnnnnnnnnnnnnnnnnnnnnnnnnnnnnnnnnnnnnnnnnnnnnnnnnnnnnnnnnnnnnnnnnnnnnnnnnnnnnnnnnnnnnnnnnnnnnnnnnnnnnnnnnnnnnnnnnnnnnnnnnnnnnnnnnnnnnnnnnnnnnnnnnnnnnnnnnnnnnnnnnnnnnnnnnnnnnnnnnnnnnnnnnnnnnnnnnnnnnnnnnnnnnnnnnnnnnnnnnnnnnnnnnnnnnnnnnnnnnnnnnnnnnnnnnnnnnnnnnnnnnnnnnnnnnnnnnnnnnnnnnnnnnnnnnnnnnnnnnnnnnnnnnnnnnnnnnnnnnnnnnnnnnnnnnnnnnnnnnnnnnnnnnnnnnnnnnnnnnnnnnnnnnnnnnnnnnnnnnnnnnnnnnnnnnnnnnnnnnnnnnnnnnnnnnnnnnnnnnnnnnnnnnnnnnnnnnnnnnnnnnnnnnnnnnnnnnnnnnnnnnnnnnnnnnnnnnnnnnnnnnnnnnnnnnnnnnnnnnnnnnnnnnnnnnnnnnnnnnnnnnnnnnnnnnnnnnnnnnnnnnnnnnnnnnnnnnnnnnnnnnnnnnnnnnnnnnnnnnnnnnnnnnnnnnnnnnnnnnnnnnnnnnnnnnnnnnnnnnnnnnnnnnnnnnnnnnnnnnnnnnnnnnnnnnnnnnnnnnnnnnnnnnnnnnnnnnnnnnnnnnnnnnnnnnnnnnnnnnnnnnnnnnnnnnnnnnnnnnnnnnnnnnnnnnnnnnnnnnnnnnnnnnnnnnnnnnnnnnnnnnnnnnnnnnnnnnnnnnnnnnnnnnnnnnnnnnnnnnnnnnnnnnnnnnnnnnnnnnnnnnnnnnnnnnnnnnnnnnnnnnnnnnnnnnnnnnnnnnnnnnnnnnnnnnnnnnnnnnnnnnnnnnnnnnnnnnnnnnnnnnnnnnnnnnnnnnnnnnnnnnnnnnnnnnnnnnnnnnnnnnnnnnnnnnnnnnnnnnnnnnnnnnnnnnnnnnnnnnnnnnnnnnnnnnnnnnnnnnnnnnnnnnnnnnnnnnnnnnnnnnnnnnnnnnnnnnnnnnnnnnnnnnnnnnnnnnnnnnnnnnnnnnnnnnnnnnnnnnnnnnnnnnnnnnnnnnnnnnnnnnnnnnnnnnnnnnnnnnnnnnnnnnnnnnnnnnnnnnnnnnnnnnnnnnnnnnnnnnnnnnnnnnnnnnnnnnnnnnnnnnnnnnnnnnnnnnnnnnnnnnnnnnnnnnnnnnnnnnnnnnnnnnnnnnnnnnnnnnnnnnnnnnnnnnnnnnnnnnnnnnnnnnnnnnnnnnnnnnnnnnnnnnnnnnnnnnnnnnnnnnnnnnnnnnnnnnnnnnnnnnnnnnnnnnnnnnnnnnnnnnnnnnnnnnnnnnnnnnnnnnnnnnnnnnnnnnnnnnnnnnnnnnnnnnnnnnnnnnnnnnnnnnnnnnnnnnnnnnnnnnnnnnnnnnnnnnnnnnnnnnnnnnnnnnnnnnnnnnnnnnnnnnnnnnnnnnnnnnnnnnnnnnnnnnnnnnnnnnnnnnnnnnnnnnnnnnnnnnnnnnnnnnnnnnnnnnnnnnnnnnnnnnnnnnnnnnnnnnnnnnnnnnnnnnnnnnnnnnnnnnnnnnnnnnnnnnnnnnnnnnnnnnnnnnnnnnnnnnnnnnnnnnnnnnnnnnnnnnnnnnnnnnnnnnnnnnnnnnnnnnnnnnnnnnnnnnnnnnnnnnnnnnnnnnnnnnnnnnnnnnnnnnnnnnnnnnnnnnnnnnnnnnnnnnnnnnnnnnnnnnnnnnnnnnnnnnnnnnnnnnnnnnnnnnnnnnnnnnnnnnnnnnnnnnnnnnnnnnnnnnnnnnnnnnnnnnnnnnnnnnnnnnnnnnnnnnnnnnnnnnnnnnnnnnnnnnnnnnnnnnnnnnnnnnnnnnnnnnnnnnnnnnnnnnnnnnnnnnnnnnnnnnnnnnnnnnnnnnnnnnnnnnnnnnnnnnnnnnnnnnnnnnnnnnnnnnnnnnnnnnnnnnnnnnnnnnnnnnnnnnnnnnnnnnnnnnnnnnnnnnnnnnnnnnnnnnnnnnnnnnnnnnnnnnnnnnnnnnnnnnnnnnnnnnnnnnnnnnnnnnnnnnnnnnnnnnnnnnnnnnnnnnnnnnnnnnnnnnnnnnnnnnnnnnnnnnnnnnnnnnnnnnnnnnnnnnnnnnnnnnnnnnnnnnnnnnnnnnnnnnnnnnnnnnnnnnnnnnnnnnnnnnnnnnnnnnnnnnnnnnnnnnnnnnnnnnnnnnnnnnnnnnnnnnnnnnnnnnnnnnnnnnnnnnnnnnnnnnnnnnnnnnnnnnnnnnnnnnnnnnnnnnnnnnnnnnnnnnnnnnnnnnnnnnnnnnnnnnnnnnnnnnnnnnnnnnnnnnnnnnnnnnnnnnnnnnnnnnnnnnnnnnnnnnnnnnnnnnnnnnnnnnnnnnnnnnnnnnnnnnnnnnnnnnnnnnnnnnnnnnnnnnnnnnnnnnnnnnnnnnnnnnnnnnnnnnnnnnnnnnnnnnnnnnnnnnnnnnnnnnnnnnnnnnnnnnnnnnnnnnnnnnnnnnnnnnnnnnnnnnnnnnnnnnnnnnnnnnnnnnnnnnnnnnnnnnnnnnnnnnnnnnnnnnnnnnnnnnnnnnnnnnnnnnnnnnnnnnnnnnnnnnnnnnnnnnnnnnnnnnnnnnnnnnnnnnnnnnnnnnnnnnnnnnnnnnnnnnnnnnnnnnnnnnnnnnnnnnnnnnnnnnnnnnnnnnnnnnnnnnnnnnnnnnnnnnnnnnnnnnnnnnnnnnnnnnnnnnnnnnnnnnnnnnnnnnnnnnnnnnnnnnnnnnnnnnnnnnnnnnnnnnnnnnnnnnnnnnnnnnnnnnnnnnnnnnnnnnnnnnnnnnnnnnnnnnnnnnnnnnnnnnnnnnnnnnnnnnnnnnnnnnnnnnnnnnnnnnnnnnnnnnnnnnnnnnnnnnnnnnnnnnnnnnnnnnnnnnnnnnnnnnnnnnnnnnnnnnnnnnnnnnnnnnnnnnnnnnnnnnnnnnnnnnnnnnnnnnnnnnnnnnnnnnnnnnnnnnnnnnnnnnnnnnnnnnnnnnnnnnnnnnnnnnnnnnnnnnnnnnnnnnnnnnnnnnnnnnnnnnnnnnnnnnnnnnnnnnnnnnnnnnnnnnnnnnnnnnnnnnnnnnnnnnnnnnnnnnnnnnnnnnnnnnnnnnnnnnnnnnnnnnnnnnnnnnnnnnnnnnnnnnnnnnnnnnnnnnnnnnnnnnnnnnnnnnnnnnnnnnnnnnnnnnnnnnnnnnnnnnnnnnnnnnnnnnnnnnnnnnnnnnnnnnnnnnnnnnnnnnnnnnnnnnnnnnnnnnnnnnnnnnnnnnnnnnnnnnnnnnnnnnnnnnnnnnnnnnnnnnnnnnnnnnnnnnnnnnnnnnnnnnnnnnnnnnnnnnnnnnnnnnnnnnnnnnnnnnnnnnnnnnnnnnnnnnnnnnnnnnnnnnnnnnnnnnnnnnnnnnnnnnnnnnnnnnnnnnnnnnnnnnnnnnnnnnnnnnnnnnnnnnnnnnnnnnnnnnnnnnnnnnnnnnnnnnnnnnnnnnnnnnnnnnnnnnnnnnnnnnnnnnnnnnnnnnnnnnnnnnnnnnnnnnnnnnnnnnnnnnnnnnnnnnnnnnnnnnnnnnnnnnnnnnnnnnnnnnnnnnnnnnnnnnnnnnnnnnnnnnnnnnnnnnnnnnnnnnnnnnnnnnnnnnnnnnnnnnnnnnnnnnnnnnnnnnnnnnnnnnnnnnnnnnnnnnnnnnnnnnnnnnnnnnnnnnnnnnnnnnnnnnnnnnnnnnnnnnnnnnnnnnnnnnnnnnnnnnnnnnnnnnnnnnnnnnnnnnnnnnnnnnnnnnnnnnnnnnnnnnnnnnnnnnnnnnnnnnnnnnnnnnnnnnnnnnnnnnnnnnnnnnnnnnnnnnnnnnnnnnnnnnnnnnnnnnnnnnnnnnnnnnnnnnnnnnnnnnnnnnnnnnnnnnnnnnnnnnnnnnnnnnnnnnnnnnnnnnnnnnnnnnnnnnnnnnnnnnnnnnnnnnnnnnnnnnnnnnnnnnnnnnnnnnnnnnnnnnnnnnnnnnnnnnnnnnnnnnnnnnnnnnnnnnnnnnnnnnnnnnnnnnnnnnnnnnnnnnnnnnnnnnnnnnnnnnnnnnnnnnnnnnnnnnnnnnnnnnnnnnnnnnnnnnnnnnnnnnnnnnnnnnnnnnnnnnnnnnnnnnnnnnnnnnnnnnnnnnnnnnnnnnnnnnnnnnnnnnnnnnnnnnnnnnnnnnnnnnnnnnnnnnnnnnnnnnnnnnnnnnnnnnnnnnnnnnnnnnnnnnnnnnnnnnnnnnnnnnnnnnnnnnnnnnnnnnnnnnnnnnnnnnnnnnnnnnnnnnnnnnnnnnnnnnnnnnnnnnnnnnnnnnnnnnnnnnnnnnnnnnnnnnnnnnnnnnnnnnnnnnnnnnnnnnnnnnnnnnnnnnnnnnnnnnnnnnnnnnnnnnnnnnnnnnnnnnnnnnnnnnnnnnnnnnnnnnnnnnnnnnnnnnnnnnnnnnnnnnnnnnnnnnnnnnnnnnnnnnnnnnnnnnnnnnnnnnnnnnnnnnnnnnnnnnnnnnnnnnnnnnnnnnnnnnnnnnnnnnnnnnnnnnnnnnnnnnnnnnnnnnnnnnnnnnnnnnnnnnnnnnnnnnnnnnnnnnnnnnnnnnnnnnnnnnnnnnnnnnnnnnnnnnnnnnnnnnnnnnnnnnnnnnnnnnnnnnnnnnnnnnnnnnnnnnnnnnnnnnnnnnnnnnnnnnnnnnnnnnnnnnnnnnnnnnnnnnnnnnnnnnnnnnnnnnnnnnnnnnnnnnnnnnnnnnnnnnnnnnnnnnnnnnnnnnnnnnnnnnnnnnnnnnnnnnnnnnnnnnnnnnnnnnnnnnnnnnnnnnnnnnnnnnnnnnnnnnnnnnnnnnnnnnnnnnnnnnnnnnnnnnnnnnnnnnnnnnnnnnnnnnnnnnnnnnnnnnnnnnnnnnnnnnnnnnnnnnnnnnnnnnnnnnnnnnnnnnnnnnnnnnnnnnnnnnnnnnnnnnnnnnnnnnnnnnnnnnnnnnnnnnnnnnnnnnnnnnnnnnnnnnnnnnnnnnnnnnnnnnnnnnnnnnnnnnnnnnnnnnnnnnnnnnnnnnnnnnnnnnnnnnnnnnnnnnnnnnnnnnnnnnnnnnnnnnnnnnnnnnnnnnnnnnnnnnnnnnnnnnnnnnnnnnnnnnnnnnnnnnnnnnnnnnnnnnnnnnnnnnnnnnnnnnnnnnnnnnnnnnnnnnnnnnnnnnnnnnnnnnnnnnnnnnnnnnnnnnnnnnnnnnnnnnnnnnnnnnnnnnnnnnnnnnnnnnnnnnnnnnnnnnnnnnnnnnnnnnnnnnnnnnnnnnnnnnnnnnnnnnnnnnnnnnnnnnnnnnnnnnnnnnnnnnnnnnnnnnnnnnnnnnnnnnnnnnnnnnnnnnnnnnnnnnnnnnnnnnnnnnnnnnnnnnnnnnnnnnnnnnnnnnnnnnnnnnnnnnnnnnnnnnnnnnnnnnnnnnnnnnnnnnnnnnnnnnnnnnnnnnnnnnnnnnnnnnnnnnnnnnnnnnnnnnnnnnnnnnnnnnnnnnnnnnnnnnnnnnnnnnnnnnnnnnnnnnnnnnnnnnnnnnnnnnnnnnnnnnnnnnnnnnnnnnnnnnnnnnnnnnnnnnnnnnnnnnnnnnnnnnnnnnnnnnnnnnnnnnnnnnnnnnnnnnnnnnnnnnnnnnnnnnnnnnnnnnnnnnnnnnnnnnnnnnnnnnnnnnnnnnnnnnnnnnnnnnnnnnnnnnnnnnnnnnnnnnnnnnnnnnnnnnnnnnnnnnnnnnnnnnnnnnnnnnnnnnnnnnnnnnnnnnnnnnnnnnnnnnnnnnnnnnnnnnnnnnnnnnnnnnnnnnnnnnnnnnnnnnnnnnnnnnnnnnnnnnnnnnnnnnnnnnnnnnnnnnnnnnnnnnnnnnnnnnnnnnnnnnnnnnnnnnnnnnnnnnnnnnnnnnnnnnnnnnnnnnnnnnnnnnnnnnnnnnnnnnnnnnnnnnnnnnnnnnnnnnnnnnnnnnnnnnnnnnnnnnnnnnnnnnnnnnnnnnnnnnnnnnnnnnnnnnnnnnnnnnnnnnnnnnnnnnnnnnnnnnnnnnnnnnnnnnnnnnnnnnnnnnnnnnnnnnnnnnnnnnnnnnnnnnnnnnnnnnnnnnnnnnnnnnnnnnnnnnnnnnnnnnnnnnnnnnnnnnnnnnnnnnnnnnnnnnnnnnnnnnnnnnnnnnnnnnnnnnnnnnnnnnnnnnnnnnnnnnnnnnnnnnnnnnnnnnnnnnnnnnnnnnngctcttcnnnnngaagagcttc

SEQ ID NO: 16 - DNA, 42 bp, Artificial Sequence
  source: /note="Description of Artificial Sequence: Synthetic oligonucleotide"
  modified_base (11)..(15): a, c, t, or g
  modified_base (28)..(32): a, c, t, or g
gaagctcttcnnnnngaagagctcttcnnnnngaagagcttc

SEQ ID NO: 17 - DNA, 19 bp, Artificial Sequence
  source: /note="Description of Artificial Sequence: Synthetic oligonucleotide"
  modified_base (4)..(5): a, c, t, or g
  modified_base (12)..(13): a, c, t, or g
gacnnggtctcnngagacc

SEQ ID NO: 18 - DNA, 19 bp, Artificial Sequence
  source: /note="Description of Artificial Sequence: Synthetic oligonucleotide"
  modified_base (11)..(12): a, c, t, or g
gaagctcttcnngaagagc

SEQ ID NO: 19 - DNA, 300042 bp, Artificial Sequence
  source: /note="Description of Artificial Sequence: Synthetic polynucleotide"
  modified_base (4)..(5): a, c, t, or g
  modified_base (12)..(17): a, c, t, or g
  modified_base (24)..(300023): a, c, t, or g
  misc_feature (24)..(300023): /note="This region may encompass 0-300000 nucleotides"
  modified_base (300030)..(300031): a, c, t, or g
  modified_base (300038)..(300039): a, c, t, or g
  source: /note="See specification as filed for detailed description of substitutions and preferred embodiments"
gacnnggtctcnnnnnngagaccnnnnnnnnnnnnnnnnnnnnnnnnnnnnnnnnnnnnnnnnnnnnnnnnnnnnnnnnnnnnnnnnnnnnnnnnnnnnnnnnnnnnnnnnnnnnnnnnnnnnnnnnnnnnnnnnnnnnnnnnnnnnnnnnnnnnnnnnnnnnnnnnnnnnnnnnnnnnnnnnnnnnnnnnnnnnnnnnnnnnnnnnnnnnnnnnnnnnnnnnnnnnnnnnnnnnnnnnnnnnnnnnnnnnnnnnnnnnnnnnnnnnnnnnnnnnnnnnnnnnnnnnnnnnnnnnnnnnnnnnnnnnnnnnnnnnnnnnnnnnnnnnnnnnnnnnnnnnnnnnnnnnnnnnnnnnnnnnnnnnnnnnnnnnnnnnnnnnnnnnnnnnnnnnnnnnnnnnnnnnnnnnnnnnnnnnnnnnnnnnnnnnnnnnnnnnnnnnnnnnnnnnnnnnnnnnnnnnnnnnnnnnnnnnnnnnnnnnnnnnnnnnnnnnnnnnnnnnnnnnnnnnnnnnnnnnnnnnnnnnnnnnnnnnnnnnnnnnnnnnnnnnnnnnnnnnnnnnnnnnnnnnnnnnnnnnnnnnnnnnnnnnnnnnnnnnnnnnnnnnnnnnnnnnnnnnnnnnnnnnnnnnnnnnnnnnnnnnnnnnnnnnnnnnnnnnnnnnnnnnnnnnnnnnnnnnnnnnnnnnnnnnnnnnnnnnnnnnnnnnnnnnnnnnnnnnnnnnnnnnnnnnnnnnnnnnnnnnnnnnnnnnnnnnnnnnnnnnnnnnnnnnnnnnnnnnnnnnnnnnnnnnnnnnnnnnnnnnnnnnnnnnnnnnnnnnnnnnnnnnnnnnnnnnnnnnnnnnnnnnnnnnnnnnnnnnnnnnnnnnnnnnnnnnnnnnnnnnnnnnnnnnnnnnnnnnnnnnnnnnnnnnnnnnnnnnnnnnnnnnnnnnnnnnnnnnnnnnnnnnnnnnnnnnnnnnnnnnnnnnnnnnnnnnnnnnnnnnnnnnnnnnnnnnnnnnnnnnnnnnnnnnnnnnnnnnnnnnnnnnnnnnnnnnnnnnnnnnnnnnnnnnnnnnnnnnnnnnnnnnnnnnnnnnnnnnnnnnnnnnnnnnnnnnnnnnnnnnnnnnnnnnnnnnnnnnnnnnnnnnnnnnnnnnnnnnnnnnnnnnnnnnnnnnnnnnnnnnnnnnnnnnnnnnnnnnnnnnnnnnnnnnnnnnnnnnnnnnnnnnnnnnnnnnnnnnnnnnnnnnnnnnnnnnnnnnnnnnnnnnnnnnnnnnnnnnnnnnnnnnnnnnnnnnnnnnnnnnnnnnnnnnnnnnnnnnnnnnnnnnnnnnnnnnnnnnnnnnnnnnnnnnnnnnnnnnnnnnnnnnnnnnnnnnnnnnnnnnnnnnnnnnnnnnnnnnnnnnnnnnnnnnnnnnnnnnnnnnnnnnnnnnnnnnnnnnnnnnnnnnnnnnnnnnnnnnnnnnnnnnnnnnnnnnnnnnnnnnnnnnnnnnnnnnnnnnnnnnnnnnnnnnnnnnnnnnnnnnnnnnnnnnnnnnnnnnnnnnnnnnnnnnnnnnnnnnnnnnnnnnnnnnnnnnnnnnnnnnnnnnnnnnnnnnnnnnnnnnnnnnnnnnnnnnnnnnnnnnnnnnnnnnnnnnnnnnnnnnnnnnnnnnnnnnnnnnnnnnnnnnnnnnnnnnnnnnnnnnnnnnnnnnnnnnnnnnnnnnnnnnnnnnnnnnnnnnnnnnnnnnnnnnnnnnnnnnnnnnnnnnnnnnnnnnnnnnnnnnnnnnnnnnnnnnnnnnnnnnnnnnnnnnnnnnnnnnnnnnnnnnnnnnnnnnnnnnnnnnnnnnnnnnnnnnnnnnnnnnnnnnnnnnnnnnnnnnnnnnnnnnnnnnnnnnnnnnnnnnnnnnnnnnnnnnnnnnnnnnnnnnnnnnnnnnnnnnnnnnnnnnnnnnnnnnnnnnnnnnnnnnnnnnnnnnnnnnnnnnnnnnnnnnnnnnnnnnnnnnnnnnnnnnnnnnnnnnnnnnnnnnnnnnnnnnnnnnnnnnnnnnnnnnnnnnnnnnnnnnnnnnnnnnnnnnnnnnnnnnnnnnnnnnnnnnnnnnnnnnnnnnnnnnnnnnnnnnnnnnnnnnnnnnnnnnnnnnnnnnnnnnnnnnnnnnnnnnnnnnnnnnnnnnnnnnnnnnnnnnnnnnnnnnnnnnnnnnnnnnnnnnnnnnnnnnnnnnnnnnnnnnnnnnnnnnnnnnnnnnnnnnnnnnnnnnnnnnnnnnnnnnnnnnnnnnnnnnnnnnnnnnnnnnnnnnnnnnnnnnnnnnnnnnnnnnnnnnnnnnnnnnnnnnnnnnnnnnnnnnnnnnnnnnnnnnnnnnnnnnnnnnnnnnnnnnnnnnnnnnnnnnnnnnnnnnnnnnnnnnnnnnnnnnnnnnnnnnnnnnnnnnnnnnnnnnnnnnnnnnnnnnnnnnnnnnnnnnnnnnnnnnnnnnnnnnnnnnnnnnnnnnnnnnnnnnnnnnnnnnnnnnnnnnnnnnnnnnnnnnnnnnnnnnnnnnnnnnnnnnnnnnnnnnnnnnnnnnnnnnnnnnnnnnnnnnnnnnnnnnnnnnnnnnnnnnnnnnnnnnnnnnnnnnnnnnnnnnnnnnnnnnnnnnnnnnnnnnnnnnnnnnnnnnnnnnnnnnnnnnnnnnnnnnnnnnnnnnnnnnnnnnnnnnnnnnnnnnnnnnnnnnnnnnnnnnnnnnnnnnnnnnnnnnnnnnnnnnnnnnnnnnnnnnnnnnnnnnnnnnnnnnnnnnnnnnnnnnnnnnnnnnnnnnnnnnnnnnnnnnnnnnnnnnnnnnnnnnnnnnnnnnnnnnnnnnnnnnnnnnnnnnnnnnnnnnnnnnnnnnnnnnnnnnnnnnnnnnnnnnnnnnnnnnnnnnnnnnnnnnnnnnnnnnnnnnnnnnnnnnnnnnnnnnnnnnnnnnnnnnnnnnnnnnnnnnnnnnnnnnnnnnnnnnnnnnnnnnnnnnnnnnnnnnnnnnnnnnnnnnnnnnnnnnnnnnnnnnnnnnnnnnnnnnnnnnnnnnnnnnnnnnnnnnnnnnnnnnnnnnnnnnnnnnnnnnnnnnnnnnnnnnnnnnnnnnnnnnnnnnnnnnnnnnnnnnnnnnnnnnnnnnnnnnnnnnnnnnnnnnnnnnnnnnnnnnnnnnnnnnnnnnnnnnnnnnnnnnnnnnnnnnnnnnnnnnnnnnnnnnnnnnnnnnnnnnnnnnnnnnnnnnnnnnnnnnnnnnnnnnnnnnnnnnnnnnnnnnnnnnnnnnnnnnnnnnnnnnnnnnnnnnnnnnnnnnnnnnnnnnnnnnnnnnnnnnnnnnnnnnnnnnnnnnnnnnnnnnnnnnnnnnnnnnnnnnnnnnnnnnnnnnnnnnnnnnnnnnnnnnnnnnnnnnnnnnnnnnnnnnnnnnnnnnnnnnnnnnnnnnnnnnnnnnnnnnnnnnnnnnnnnnnnnnnnnnnnnnnnnnnnnnnnnnnnnnnnnnnnnnnnnnnnnnnnnnnnnnnnnnnnnnnnnnnnnnnnnnnnnnnnnnnnnnnnnnnnnnnnnnnnnnnnnnnnnnnnnnnnnnnnnnnnnnnnnnnnnnnnnnnnnnnnnnnnnnnnnnnnnnnnnnnnnnnnnnnnnnnnnnnnnnnnnnnnnnnnnnnnnnnnnnnnnnnnnnnnnnnnnnnnnnnnnnnnnnnnnnnnnnnnnnnnnnnnnnnnnnnnnnnnnnnnnnnnnnnnnnnnnnnnnnnnnnnnnnnnnnnnnnnnnnnnnnnnnnnnnnnnnnnnnnnnnnnnnnnnnnnnnnnnnnnnnnnnnnnnnnnnnnnnnnnnnnnnnnnnnnnnnnnnnnnnnnnnnnnnnnnnnnnnnnnnnnnnnnnnnnnnnnnnnnnnnnnnnnnnnnnnnnnnnnnnnnnnnnnnnnnnnnnnnnnnnnnnnnnnnnnnnnnnnnnnnnnnnnnnnnnnnnnnnnnnnnnnnnnnnnnnnnnnnnnnnnnnnnnnnnnnnnnnnnnnnnnnnnnnnnnnnnnnnnnnnnnnnnnnnnnnnnnnnnnnnnnnnnnnnnnnnnnnnnnnnnnnnnnnnnnnnnnnnnnnnnnnnnnnnnnnnnnnnnnnnnnnnnnnnnnnnnnnnnnnnnnnnnnnnnnnnnnnnnnnnnnnnnnnnnnnnnnnnnnnnnnnnnnnnnnnnnnnnnnnnnnnnnnnnnnnnnnnnnnnnnnnnnnnnnnnnnnnnnnnnnnnnnnnnnnnnnnnnnnnnnnnnnnnnnnnnnnnnnnnnnnnnnnnnnnnnnnnnnnnnnnnnnnnnnnnnnnnnnnnnnnnnnnnnnnnnnnnnnnnnnnnnnnnnnnnnnnnnnnnnnnnnnnnnnnnnnnnnnnnnnnnnnnnnnnnnnnnnnnnnnnnnnnnnnnnnnnnnnnnnnnnnnnnnnnnnnnnnnnnnnnnnnnnnnnnnnnnnnnnnnnnnnnnnnnnnnnnnnnnnnnnnnnnnnnnnnnnnnnnnnnnnnnnnnnnnnnnnnnnnnnnnnnnnnnnnnnnnnnnnnnnnnnnnnnnnnnnnnnnnnnnnnnnnnnnnnnnnnnnnnnnnnnnnnnnnnnnnnnnnnnnnnnnnnnnnnnnnnnnnnnnnnnnnnnnnnnnnnnnnnnnnnnnnnnnnnnnnnnnnnnnnnnnnnnnnnnnnnnnnnnnnnnnnnnnnnnnnnnnnnnnnnnnnnnnnnnnnnnnnnnnnnnnnnnnnnnnnnnnnnnnnnnnnnnnnnnnnnnnnnnnnnnnnnnnnnnnnnnnnnnnnnnnnnnnnnnnnnnnnnnnnnnnnnnnnnnnnnnnnnnnnnnnnnnnnnnnnnnnnnnnnnnnnnnnnnnnnnnnnnnnnnnnnnnnnnnnnnnnnnnnnnnnnnnnnnnnnnnnnnnnnnnnnnnnnnnnnnnnnnnnnnnnnnnnnnnnnnnnnnnnnnnnnnnnnnnnnnnnnnnnnnnnnnnnnnnnnnnnnnnnnnnnnnnnnnnnnnnnnnnnnnnnnnnnnnnnnnnnnnnnnnnnnnnnnnnnnnnnnnnnnnnnnnnnnnnnnnnnnnnnnnnnnnnnnnnnnnnnnnnnnnnnnnnnnnnnnnnnnnnnnnnnnnnnnnnnnnnnnnnnnnnnnnnnnnnnnnnnnnnnnnnnnnnnnnnnnnnnnnnnnnnnnnnnnnnnnnnnnnnnnnnnnnnnnnnnnnnnnnnnnnnnnnnnnnnnnnnnnnnnnnnnnnnnnnnnnnnnnnnnnnnnnnnnnnnnnnnnnnnnnnnnnnnnnnnnnnnnnnnnnnnnnnnnnnnnnnnnnnnnnnnnnnnnnnnnnnnnnnnnnnnnnnnnnnnnnnnnnnnnnnnnnnnnnnnnnnnnnnnnnnnnnnnnnnnnnnnnnnnnnnnnnnnnnnnnnnnnnnnnnnnnnnnnnnnnnnnnnnnnnnnnnnnnnnnnnnnnnnnnnnnnnnnnnnnnnnnnnnnnnnnnnnnnnnnnnnnnnnnnnnnnnnnnnnnnnnnnnnnnnnnnnnnnnnnnnnnnnnnnnnnnnnnnnnnnnnnnnnnnnnnnnnnnnnnnnnnnnnnnnnnnnnnnnnnnnnnnnnnnnnnnnnnnnnnnnnnnnnnnnnnnnnnnnnnnnnnnnnnnnnnnnnnnnnnnnnnnnnnnnnnnnnnnnnnnnnnnnnnnnnnnnnnnnnnnnnnnnnnnnnnnnnnnnnnnnnnnnnnnnnnnnnnnnnnnnnnnnnnnnnnnnnnnnnnnnnnnnnnnnnnnnnnnnnnnnnnnnnnnnnnnnnnnnnnnnnnnnnnnnnnnnnnnnnnnnnnnnnnnnnnnnnnnnnnnnnnnnnnnnnnnnnnnnnnnnnnnnnnnnnnnnnnnnnnnnnnnnnnnnnnnnnnnnnnnnnnnnnnnnnnnnnnnnnnnnnnnnnnnnnnnnnnnnnnnnnnnnnnnnnnnnnnnnnnnnnnnnnnnnnnnnnnnnnnnnnnnnnnnnnnnnnnnnnnnnnnnnnnnnnnnnnnnnnnnnnnnnnnnnnnnnnnnnnnnnnnnnnnnnnnnnnnnnnnnnnnnnnnnnnnnnnnnnnnnnnnnnnnnnnnnnnnnnnnnnnnnnnnnnnnnnnnnnnnnnnnnnnnnnnnnnnnnnnnnnnnnnnnnnnnnnnnnnnnnnnnnnnnnnnnnnnnnnnnnnnnnnnnnnnnnnnnnnnnnnnnnnnnnnnnnnnnnnnnnnnnnnnnnnnnnnnnnnnnnnnnnnnnnnnnnnnnnnnnnnnnnnnnnnnnnnnnnnnnnnnnnnnnnnnnnnnnnnnnnnnnnnnnnnnnnnnnnnnnnnnnnnnnnnnnnnnnnnnnnnnnnnnnnnnnnnnnnnnnnnnnnnnnnnnnnnnnnnnnnnnnnnnnnnnnnnnnnnnnnnnnnnnnnnnnnnnnnnnnnnnnnnnnnnnnnnnnnnnnnnnnnnnnnnnnnnnnnnnnnnnnnnnnnnnnnnnnnnnnnnnnnnnnnnnnnnnnnnnnnnnnnnnnnnnnnnnnnnnnnnnnnnnnnnnnnnnnnnnnnnnnnnnnnnnnnnnnnnnnnnnnnnnnnnnnnnnnnnnnnnnnnnnnnnnnnnnnnnnnnnnnnnnnnnnnnnnnnnnnnnnnnnnnnnnnnnnnnnnnnnnnnnnnnnnnnnnnnnnnnnnnnnnnnnnnnnnnnnnnnnnnnnnnnnnnnnnnnnnnnnnnnnnnnnnnnnnnnnnnnnnnnnnnnnnnnnnnnnnnnnnnnnnnnnnnnnnnnnnnnnnnnnnnnnnnnnnnnnnnnnnnnnnnnnnnnnnnnnnnnnnnnnnnnnnnnnnnnnnnnnnnnnnnnnnnnnnnnnnnnnnnnnnnnnnnnnnnnnnnnnnnnnnnnnnnnnnnnnnnnnnnnnnnnnnnnnnnnnnnnnnnnnnnnnnnnnnnnnnnnnnnnnnnnnnnnnnnnnnnnnnnnnnnnnnnnnnnnnnnnnnnnnnnnnnnnnnnnnnnnnnnnnnnnnnnnnnnnnnnnnnnnnnnnnnnnnnnnnnnnnnnnnnnnnnnnnnnnnnnnnnnnnnnnnnnnnnnnnnnnnnnnnnnnnnnnnnnnnnnnnnnnnnnnnnnnnnnnnnnnnnnnnnnnnnnnnnnnnnnnnnnnnnnnnnnnnnnnnnnnnnnnnnnnnnnnnnnnnnnnnnnnnnnnnnnnnnnnnnnnnnnnnnnnnnnnnnnnnnnnnnnnnnnnnnnnnnnnnnnnnnnnnnnnnnnnnnnnnnnnnnnnnnnnnnnnnnnnnnnnnnnnnnnnnnnnnnnnnnnnnnnnnnnnnnnnnnnnnnnnnnnnnnnnnnnnnnnnnnnnnnnnnnnnnnnnnnnnnnnnnnnnnnnnnnnnnnnnnnnnnnnnnnnnnnnnnnnnnnnnnnnnnnnnnnnnnnnnnnnnnnnnnnnnnnnnnnnnnnnnnnnnnnnnnnnnnnnnnnnnnnnnnnnnnnnnnnnnnnnnnnnnnnnnnnnnnnnnnnnnnnnnnnnnnnnnnnnnnnnnnnnnnnnnnnnnnnnnnnnnnnnnnnnnnnnnnnnnnnnnnnnnnnnnnnnnnnnnnnnnnnnnnnnnnnnnnnnnnnnnnnnnnnnnnnnnnnnnnnnnnnnnnnnnnnnnnnnnnnnnnnnnnnnnnnnnnnnnnnnnnnnnnnnnnnnnnnnnnnnnnnnnnnnnnnnnnnnnnnnnnnnnnnnnnnnnnnnnnnnnnnnnnnnnnnnnnnnnnnnnnnnnnnnnnnnnnnnnnnnnnnnnnnnnnnnnnnnnnnnnnnnnnnnnnnnnnnnnnnnnnnnnnnnnnnnnnnnnnnnnnnnnnnnnnnnnnnnnnnnnnnnnnnnnnnnnnnnnnnnnnnnnnnnnnnnnnnnnnnnnnnnnnnnnnnnnnnnnnnnnnnnnnnnnnnnnnnnnnnnnnnnnnnnnnnnnnnnnnnnnnnnnnnnnnnnnnnnnnnnnnnnnnnnnnnnnnnnnnnnnnnnnnnnnnnnnnnnnnnnnnnnnnnnnnnnnnnnnnnnnnnnnnnnnnnnnnnnnnnnnnnnnnnnnnnnnnnnnnnnnnnnnnnnnnnnnnnnnnnnnnnnnnnnnnnnnnnnnnnnnnnnnnnnnnnnnnnnnnnnnnnnnnnnnnnnnnnnnnnnnnnnnnnnnnnnnnnnnnnnnnnnnnnnnnnnnnnnnnnnnnnnnnnnnnnnnnnnnnnnnnnnnnnnnnnnnnnnnnnnnnnnnnnnnnnnnnnnnnnnnnnnnnnnnnnnnnnnnnnnnnnnnnnnnnnnnnnnnnnnnnnnnnnnnnnnnnnnnnnnnnnnnnnnnnnnnnnnnnnnnnnnnnnnnnnnnnnnnnnnnnnnnnnnnnnnnnnnnnnnnnnnnnnnnnnnnnnnnnnnnnnnnnnnnnnnnnnnnnnnnnnnnnnnnnnnnnnnnnnnnnnnnnnnnnnnnnnnnnnnnnnnnnnnnnnnnnnnnnnnnnnnnnnnnnnnnnnnnnnnnnnnnnnnnnnnnnnnnnnnnnnnnnnnnnnnnnnnnnnnnnnnnnnnnnnnnnnnnnnnnnnnnnnnnnnnnnnnnnnnnnnnnnnnnnnnnnnnnnnnnnnnnnnnnnnnnnnnnnnnnnnnnnnnnnnnnnnnnnnnnnnnnnnnnnnnnnnnnnnnnnnnnnnnnnnnnnnnnnnnnnnnnnnnnnnnnnnnnnnnnnnnnnnnnnnnnnnnnnnnnnnnnnnnnnnnnnnnnnnnnnnnnnnnnnnnnnnnnnnnnnnnnnnnnnnnnnnnnnnnnnnnnnnnnnnnnnnnnnnnnnnnnnnnnnnnnnnnnnnnnnnnnnnnnnnnnnnnnnnnnnnnnnnnnnnnnnnnnnnnnnnnnnnnnnnnnnnnnnnnnnnnnnnnnnnnnnnnnnnnnnnnnnnnnnnnnnnnnnnnnnnnnnnnnnnnnnnnnnnnnnnnnnnnnnnnnnnnnnnnnnnnnnnnnnnnnnnnnnnnnnnnnnnnnnnnnnnnnnnnnnnnnnnnnnnnnnnnnnnnnnnnnnnnnnnnnnnnnnnnnnnnnnnnnnnnnnnnnnnnnnnnnnnnnnnnnnnnnnnnnnnnnnnnnnnnnnnnnnnnnnnnnnnnnnnnnnnnnnnnnnnnnnnnnnnnnnnnnnnnnnnnnnnnnnnnnnnnnnnnnnnnnnnnnnnnnnnnnnnnnnnnnnnnnnnnnnnnnnnnnnnnnnnnnnnnnnnnnnnnnnnnnnnnnnnnnnnnnnnnnnnnnnnnnnnnnnnnnnnnnnnnnnnnnnnnnnnnnnnnnnnnnnnnnnnnnnnnnnnnnnnnnnnnnnnnnnnnnnnnnnnnnnnnnnnnnnnnnnnnnnnnnnnnnnnnnnnnnnnnnnnnnnnnnnnnnnnnnnnnnnnnnnnnnnnnnnnnnnnnnnnnnnnnnnnnnnnnnnnnnnnnnnnnnnnnnnnnnnnnnnnnnnnnnnnnnnnnnnnnnnnnnnnnnnnnnnnnnnnnnnnnnnnnnnnnnnnnnnnnnnnnnnnnnnnnnnnnnnnnnnnnnnnnnnnnnnnnnnnnnnnnnnnnnnnnnnnnnnnnnnnnnnnnnnnnnnnnnnnnnnnnnnnnnnnnnnnnnnnnnnnnnnnnnnnnnnnnnnnnnnnnnnnnnnnnnnnnnnnnnnnnnnnnnnnnnnnnnnnnnnnnnnnnnnnnnnnnnnnnnnnnnnnnnnnnnnnnnnnnnnnnnnnnnnnnnnnnnnnnnnnnnnnnnnnnnnnnnnnnnnnnnnnnnnnnnnnnnnnnnnnnnnnnnnnnnnnnnnnnnnnnnnnnnnnnnnnnnnnnnnnnnnnnnnnnnnnnnnnnnnnnnnnnnnnnnnnnnnnnnnnnnnnnnnnnnnnnnnnnnnnnnnnnnnnnnnnnnnnnnnnnnnnnnnnnnnnnnnnnnnnnnnnnnnnnnnnnnnnnnnnnnnnnnnnnnnnnnnnnnnnnnnnnnnnnnnnnnnnnnnnnnnnnnnnnnnnnnnnnnnnnnnnnnnnnnnnnnnnnnnnnnnnnnnnnnnnnnnnnnnnnnnnnnnnnnnnnnnnnnnnnnnnnnnnnnnnnnnnnnnnnnnnnnnnnnnnnnnnnnnnnnnnnnnnnnnnnnnnnnnnnnnnnnnnnnnnnnnnnnnnnnnnnnnnnnnnnnnnnnnnnnnnnnnnnnnnnnnnnnnnnnnnnnnnnnnnnnnnnnnnnnnnnnnnnnnnnnnnnnnnnnnnnnnnnnnnnnnnnnnnnnnnnnnnnnnnnnnnnnnnnnnnnnnnnnnnnnnnnnnnnnnnnnnnnnnnnnnnnnnnnnnnnnnnnnnnnnnnnnnnnnnnnnnnnnnnnnnnnnnnnnnnnnnnnnnnnnnnnnnnnnnnnnnnnnnnnnnnnnnnnnnnnnnnnnnnnnnnnnnnnnnnnnnnnnnnnnnnnnnnnnnnnnnnnnnnnnnnnnnnnnnnnnnnnnnnnnnnnnnnnnnnnnnnnnnnnnnnnnnnnnnnnnnnnnnnnnnnnnnnnnnnnnnnnnnnnnnnnnnnnnnnnnnnnnnnnnnnnnnnnnnnnnnnnnnnnnnnnnnnnnnnnnnnnnnnnnnnnnnnnnnnnnnnnnnnnnnnnnnnnnnnnnnnnnnnnnnnnnnnnnnnnnnnnnnnnnnnnnnnnnnnnnnnnnnnnnnnnnnnnnnnnnnnnnnnnnnnnnnnnnnnnnnnnnnnnnnnnnnnnnnnnnnnnnnnnnnnnnnnnnnnnnnnnnnnnnnnnnnnnnnnnnnnnnnnnnnnnnnnnnnnnnnnnnnnnnnnnnnnnnnnnnnnnnnnnnnnnnnnnnnnnnnnnnnnnnnnnnnnnnnnnnnnnnnnnnnnnnnnnnnnnnnnnnnnnnnnnnnnnnnnnnnnnnnnnnnnnnnnnnnnnnnnnnnnnnnnnnnnnnnnnnnnnnnnnnnnnnnnnnnnnnnnnnnnnnnnnnnnnnnnnnnnnnnnnnnnnnnnnnnnnnnnnnnnnnnnnnnnnnnnnnnnnnnnnnnnnnnnnnnnnnnnnnnnnnnnnnnnnnnnnnnnnnnnnnnnnnnnnnnnnnnnnnnnnnnnnnnnnnnnnnnnnnnnnnnnnnnnnnnnnnnnnnnnnnnnnnnnnnnnnnnnnnnnnnnnnnnnnnnnnnnnnnnnnnnnnnnnnnnnnnnnnnnnnnnnnnnnnnnnnnnnnnnnnnnnnnnnnnnnnnnnnnnnnnnnnnnnnnnnnnnnnnnnnnnnnnnnnnnnnnnnnnnnnnnnnnnnnnnnnnnnnnnnnnnnnnnnnnnnnnnnnnnnnnnnnnnnnnnnnnnnnnnnnnnnnnnnnnnnnnnnnnnnnnnnnnnnnnnnnnnnnnnnnnnnnnnnnnnnnnnnnnnnnnnnnnnnnnnnnnnnnnnnnnnnnnnnnnnnnnnnnnnnnnnnnnnnnnnnnnnnnnnnnnnnnnnnnnnnnnnnnnnnnnnnnnnnnnnnnnnnnnnnnnnnnnnnnnnnnnnnnnnnnnnnnnnnnnnnnnnnnnnnnnnnnnnnnnnnnnnnnnnnnnnnnnnnnnnnnnnnnnnnnnnnnnnnnnnnnnnnnnnnnnnnnnnnnnnnnnnnnnnnnnnnnnnnnnnnnnnnnnnnnnnnnnnnnnnnnnnnnnnnnnnnnnnnnnnnnnnnnnnnnnnnnnnnnnnnnnnnnnnnnnnnnnnnnnnnnnnnnnnnnnnnnnnnnnnnnnnnnnnnnnnnnnnnnnnnnnnnnnnnnnnnnnnnnnnnnnnnnnnnnnnnnnnnnnnnnnnnnnnnnnnnnnnnnnnnnnnnnnnnnnnnnnnnnnnnnnnnnnnnnnnnnnnnnnnnnnnnnnnnnnnnnnnnnnnnnnnnnnnnnnnnnnnnnnnnnnnnnnnnnnnnnnnnnnnnnnnnnnnnnnnnnnnnnnnnnnnnnnnnnnnnnnnnnnnnnnnnnnnnnnnnnnnnnnnnnnnnnnnnnnnnnnnnnnnnnnnnnnnnnnnnnnnnnnnnnnnnnnnnnnnnnnnnnnnnnnnnnnnnnnnnnnnnnnnnnnnnnnnnnnnnnnnnnnnnnnnnnnnnnnnnnnnnnnnnnnnnnnnnnnnnnnnnnnnnnnnnnnnnnnnnnnnnnnnnnnnnnnnnnnnnnnnnnnnnnnnnnnnnnnnnnnnnnnnnnnnnnnnnnnnnnnnnnnnnnnnnnnnnnnnnnnnnnnnnnnnnnnnnnnnnnnnnnnnnnnnnnnnnnnnnnnnnnnnnnnnnnnnnnnnnnnnnnnnnnnnnnnnnnnnnnnnnnnnnnnnnnnnnnnnnnnnnnnnnnnnnnnnnnnnnnnnnnnnnnnnnnnnnnnnnnnnnnnnnnnnnnnnnnnnnnnnnnnnnnnnnnnnnnnnnnnnnnnnnnnnnnnnnnnnnnnnnnnnnnnnnnnnnnnnnnnnnnnnnnnnnnnnnnnnnnnnnnnnnnnnnnnnnnnnnnnnnnnnnnnnnnnnnnnnnnnnnnnnnnnnnnnnnnnnnnnnnnnnnnnnnnnnnnnnnnnnnnnnnnnnnnnnnnnnnnnnnnnnnnnnnnnnnnnnnnnnnnnnnnnnnnnnnnnnnnnnnnnnnnnnnnnnnnnnnnnnnnnnnnnnnnnnnnnnnnnnnnnnnnnnnnnnnnnnnnnnnnnnnnnnnnnnnnnnnnnnnnnnnnnnnnnnnnnnnnnnnnnnnnnnnnnnnnnnnnnnnnnnnnnnnnnnnnnnnnnnnnnnnnnnnnnnnnnnnnnnnnnnnnnnnnnnnnnnnnnnnnnnnnnnnnnnnnnnnnnnnnnnnnnnnnnnnnnnnnnnnnnnnnnnnnnnnnnnnnnnnnnnnnnnnnnnnnnnnnnnnnnnnnnnnnnnnnnnnnnnnnnnnnnnnnnnnnnnnnnnnnnnnnnnnnnnnnnnnnnnnnnnnnnnnnnnnnnnnnnnnnnnnnnnnnnnnnnnnnnnnnnnnnnnnnnnnnnnnnnnnnnnnnnnnnnnnnnnnnnnnnnnnnnnnnnnnnnnnnnnnnnnnnnnnnnnnnnnnnnnnnnnnnnnnnnnnnnnnnnnnnnnnnnnnnnnnnnnnnnnnnnnnnnnnnnnnnnnnnnnnnnnnnnnnnnnnnnnnnnnnnnnnnnnnnnnnnnnnnnnnnnnnnnnnnnnnnnnnnnnnnnnnnnnnnnnnnnnnnnnnnnnnnnnnnnnnnnnnnnnnnnnnnnnnnnnnnnnnnnnnnnnnnnnnnnnnnnnnnnnnnnnnnnnnnnnnnnnnnnnnnnnnnnnnnnnnnnnnnnnnnnnnnnnnnnnnnnnnnnnnnnnnnnnnnnnnnnnnnnnnnnnnnnnnnnnnnnnnnnnnnnnnnnnnnnnnnnnnnnnnnnnnnnnnnnnnnnnnnnnnnnnnnnnnnnnnnnnnnnnnnnnnnnnnnnnnnnnnnnnnnnnnnnnnnnnnnnnnnnnnnnnnnnnnnnnnnnnnnnnnnnnnnnnnnnnnnnnnnnnnnnnnnnnnnnnnnnnnnnnnnnnnnnnnnnnnnnnnnnnnnnnnnnnnnnnnnnnnnnnnnnnnnnnnnnnnnnnnnnnnnnnnnnnnnnnnnnnnnnnnnnnnnnnnnnnnnnnnnnnnnnnnnnnnnnnnnnnnnnnnnnnnnnnnnnnnnnnnnnnnnnnnnnnnnnnnnnnnnnnnnnnnnnnnnnnnnnnnnnnnnnnnnnnnnnnnnnnnnnnnnnnnnnnnnnnnnnnnnnnnnnnnnnnnnnnnnnnnnnnnnnnnnnnnnnnnnnnnnnnnnnnnnnnnnnnnnnnnnnnnnnnnnnnnnnnnnnnnnnnnnnnnnnnnnnnnnnnnnnnnnnnnnnnnnnnnnnnnnnnnnnnnnnnnnnnnnnnnnnnnnnnnnnnnnnnnnnnnnnnnnnnnnnnnnnnnnnnnnnnnnnnnnnnnnnnnnnnnnnnnnnnnnnnnnnnnnnnnnnnnnnnnnnnnnnnnnnnnnnnnnnnnnnnnnnnnnnnnnnnnnnnnnnnnnnnnnnnnnnnnnnnnnnnnnnnnnnnnnnnnnnnnnnnnnnnnnnnnnnnnnnnnnnnnnnnnnnnnnnnnnnnnnnnnnnnnnnnnnnnnnnnnnnnnnnnnnnnnnnnnnnnnnnnnnnnnnnnnnnnnnnnnnnnnnnnnnnnnnnnnnnnnnnnnnnnnnnnnnnnnnnnnnnnnnnnnnnnnnnnnnnnnnnnnnnnnnnnnnnnnnnnnnnnnnnnnnnnnnnnnnnnnnnnnnnnnnnnnnnnnnnnnnnnnnnnnnnnnnnnnnnnnnnnnnnnnnnnnnnnnnnnnnnnnnnnnnnnnnnnnnnnnnnnnnnnnnnnnnnnnnnnnnnnnnnnnnnnnnnnnnnnnnnnnnnnnnnnnnnnnnnnnnnnnnnnnnnnnnnnnnnnnnnnnnnnnnnnnnnnnnnnnnnnnnnnnnnnnnnnnnnnnnnnnnnnnnnnnnnnnnnnnnnnnnnnnnnnnnnnnnnnnnnnnnnnnnnnnnnnnnnnnnnnnnnnnnnnnnnnnnnnnnnnnnnnnnnnnnnnnnnnnnnnnnnnnnnnnnnnnnnnnnnnnnnnnnnnnnnnnnnnnnnnnnnnnnnnnnnnnnnnnnnnnnnnnnnnnnnnnnnnnnnnnnnnnnnnnnnnnnnnnnnnnnnnnnnnnnnnnnnnnnnnnnnnnnnnnnnnnnnnnnnnnnnnnnnnnnnnnnnnnnnnnnnnnnnnnnnnnnnnnnnnnnnnnnnnnnnnnnnnnnnnnnnnnnnnnnnnnnnnnnnnnnnnnnnnnnnnnnnnnnnnnnnnnnnnnnnnnnnnnnnnnnnnnnnnnnnnnnnnnnnnnnnnnnnnnnnnnnnnnnnnnnnnnnnnnnnnnnnnnnnnnnnnnnnnnnnnnnnnnnnnnnnnnnnnnnnnnnnnnnnnnnnnnnnnnnnnnnnnnnnnnnnnnnnnnnnnnnnnnnnnnnnnnnnnnnnnnnnnnnnnnnnnnnnnnnnnnnnnnnnnnnnnnnnnnnnnnnnnnnnnnnnnnnnnnnnnnnnnnnnnnnnnnnnnnnnnnnnnnnnnnnnnnnnnnnnnnnnnnnnnnnnnnnnnnnnnnnnnnnnnnnnnnnnnnnnnnnnnnnnnnnnnnnnnnnnnnnnnnnnnnnnnnnnnnnnnnnnnnnnnnnnnnnnnnnnnnnnnnnnnnnnnnnnnnnnnnnnnnnnnnnnnnnnnnnnnnnnnnnnnnnnnnnnnnnnnnnnnnnnnnnnnnnnnnnnnnnnnnnnnnnnnnnnnnnnnnnnnnnnnnnnnnnnnnnnnnnnnnnnnnnnnnnnnnnnnnnnnnnnnnnnnnnnnnnnnnnnnnnnnnnnnnnnnnnnnnnnnnnnnnnnnnnnnnnnnnnnnnnnnnnnnnnnnnnnnnnnnnnnnnnnnnnnnnnnnnnnnnnnnnnnnnnnnnnnnnnnnnnnnnnnnnnnnnnnnnnnnnnnnnnnnnnnnnnnnnnnnnnnnnnnnnnnnnnnnnnnnnnnnnnnnnnnnnnnnnnnnnnnnnnnnnnnnnnnnnnnnnnnnnnnnnnnnnnnnnnnnnnnnnnnnnnnnnnnnnnnnnnnnnnnnnnnnnnnnnnnnnnnnnnnnnnnnnnnnnnnnnnnnnnnnnnnnnnnnnnnnnnnnnnnnnnnnnnnnnnnnnnnnnnnnnnnnnnnnnnnnnnnnnnnnnnnnnnnnnnnnnnnnnnnnnnnnnnnnnnnnnnnnnnnnnnnnnnnnnnnnnnnnnnnnnnnnnnnnnnnnnnnnnnnnnnnnnnnnnnnnnnnnnnnnnnnnnnnnnnnnnnnnnnnnnnnnnnnnnnnnnnnnnnnnnnnnnnnnnnnnnnnnnnnnnnnnnnnnnnnnnnnnnnnnnnnnnnnnnnnnnnnnnnnnnnnnnnnnnnnnnnnnnnnnnnnnnnnnnnnnnnnnnnnnnnnnnnnnnnnnnnnnnnnnnnnnnnnnnnnnnnnnnnnnnnnnnnnnnnnnnnnnnnnnnnnnnnnnnnnnnnnnnnnnnnnnnnnnnnnnnnnnnnnnnnnnnnnnnnnnnnnnnnnnnnnnnnnnnnnnnnnnnnnnnnnnnnnnnnnnnnnnnnnnnnnnnnnnnnnnnnnnnnnnnnnnnnnnnnnnnnnnnnnnnnnnnnnnnnnnnnnnnnnnnnnnnnnnnnnnnnnnnnnnnnnnnnnnnnnnnnnnnnnnnnnnnnnnnnnnnnnnnnnnnnnnnnnnnnnnnnnnnnnnnnnnnnnnnnnnnnnnnnnnnnnnnnnnnnnnnnnnnnnnnnnnnnnnnnnnnnnnnnnnnnnnnnnnnnnnnnnnnnnnnnnnnnnnnnnnnnnnnnnnnnnnnnnnnnnnnnnnnnnnnnnnnnnnnnnnnnnnnnnnnnnnnnnnnnnnnnnnnnnnnnnnnnnnnnnnnnnnnnnnnnnnnnnnnnnnnnnnnnnnnnnnnnnnnnnnnnnnnnnnnnnnnnnnnnnnnnnnnnnnnnnnnnnnnnnnnnnnnnnnnnnnnnnnnnnnnnnnnnnnnnnnnnnnnnnnnnnnnnnnnnnnnnnnnnnnnnnnnnnnnnnnnnnnnnnnnnnnnnnnnnnnnnnnnnnnnnnnnnnnnnnnnnnnnnnnnnnnnnnnnnnnnnnnnnnnnnnnnnnnnnnnnnnnnnnnnnnnnnnnnnnnnnnnnnnnnnnnnnnnnnnnnnnnnnnnnnnnnnnnnnnnnnnnnnnnnnnnnnnnnnnnnnnnnnnnnnnnnnnnnnnnnnnnnnnnnnnnnnnnnnnnnnnnnnnnnnnnnnnnnnnnnnnnnnnnnnnnnnnnnnnnnnnnnnnnnnnnnnnnnnnnnnnnnnnnnnnnnnnnnnnnnnnnnnnnnnnnnnnnnnnnnnnnnnnnnnnnnnnnnnnnnnnnnnnnnnnnnnnnnnnnnnnnnnnnnnnnnnnnnnnnnnnnnnnnnnnnnnnnnnnnnnnnnnnnnnnnnnnnnnnnnnnnnnnnnnnnnnnnnnnnnnnnnnnnnnnnnnnnnnnnnnnnnnnnnnnnnnnnnnnnnnnnnnnnnnnnnnnnnnnnnnnnnnnnnnnnnnnnnnnnnnnnnnnnnnnnnnnnnnnnnnnnnnnnnnnnnnnnnnnnnnnnnnnnnnnnnnnnnnnnnnnnnnnnnnnnnnnnnnnnnnnnnnnnnnnnnnnnnnnnnnnnnnnnnnnnnnnnnnnnnnnnnnnnnnnnnnnnnnnnnnnnnnnnnnnnnnnnnnnnnnnnnnnnnnnnnnnnnnnnnnnnnnnnnnnnnnnnnnnnnnnnnnnnnnnnnnnnnnnnnnnnnnnnnnnnnnnnnnnnnnnnnnnnnnnnnnnnnnnnnnnnnnnnnnnnnnnnnnnnnnnnnnnnnnnnnnnnnnnnnnnnnnnnnnnnnnnnnnnnnnnnnnnnnnnnnnnnnnnnnnnnnnnnnnnnnnnnnnnnnnnnnnnnnnnnnnnnnnnnnnnnnnnnnnnnnnnnnnnnnnnnnnnnnnnnnnnnnnnnnnnnnnnnnnnnnnnnnnnnnnnnnnnnnnnnnnnnnnnnnnnnnnnnnnnnnnnnnnnnnnnnnnnnnnnnnnnnnnnnnnnnnnnnnnnnnnnnnnnnnnnnnnnnnnnnnnnnnnnnnnnnnnnnnnnnnnnnnnnnnnnnnnnnnnnnnnnnnnnnnnnnnnnnnnnnnnnnnnnnnnnnnnnnnnnnnnnnnnnnnnnnnnnnnnnnnnnnnnnnnnnnnnnnnnnnnnnnnnnnnnnnnnnnnnnnnnnnnnnnnnnnnnnnnnnnnnnnnnnnnnnnnnnnnnnnnnnnnnnnnnnnnnnnnnnnnnnnnnnnnnnnnnnnnnnnnnnnnnnnnnnnnnnnnnnnnnnnnnnnnnnnnnnnnnnnnnnnnnnnnnnnnnnnnnnnnnnnnnnnnnnnnnnnnnnnnnnnnnnnnnnnnnnnnnnnnnnnnnnnnnnnnnnnnnnnnnnnnnnnnnnnnnnnnnnnnnnnnnnnnnnnnnnnnnnnnnnnnnnnnnnnnnnnnnnnnnnnnnnnnnnnnnnnnnnnnnnnnnnnnnnnnnnnnnnnnnnnnnnnnnnnnnnnnnnnnnnnnnnnnnnnnnnnnnnnnnnnnnnnnnnnnnnnnnnnnnnnnnnnnnnnnnnnnnnnnnnnnnnnnnnnnnnnnnnnnnnnnnnnnnnnnnnnnnnnnnnnnnnnnnnnnnnnnnnnnnnnnnnnnnnnnnnnnnnnnnnnnnnnnnnnnnnnnnnnnnnnnnnnnnnnnnnnnnnnnnnnnnnnnnnnnnnnnnnnnnnnnnnnnnnnnnnnnnnnnnnnnnnnnnnnnnnnnnnnnnnnnnnnnnnnnnnnnnnnnnnnnnnnnnnnnnnnnnnnnnnnnnnnnnnnnnnnnnnnnnnnnnnnnnnnnnnnnnnnnnnnnnnnnnnnnnnnnnnnnnnnnnnnnnnnnnnnnnnnnnnnnnnnnnnnnnnnnnnnnnnnnnnnnnnnnnnnnnnnnnnnnnnnnnnnnnnnnnnnnnnnnnnnnnnnnnnnnnnnnnnnnnnnnnnnnnnnnnnnnnnnnnnnnnnnnnnnnnnnnnnnnnnnnnnnnnnnnnnnnnnnnnnnnnnnnnnnnnnnnnnnnnnnnnnnnnnnnnnnnnnnnnnnnnnnnnnnnnnnnnnnnnnnnnnnnnnnnnnnnnnnnnnnnnnnnnnnnnnnnnnnnnnnnnnnnnnnnnnnnnnnnnnnnnnnnnnnnnnnnnnnnnnnnnnnnnnnnnnnnnnnnnnnnnnnnnnnnnnnnnnnnnnnnnnnnnnnnnnnnnnnnnnnnnnnnnnnnnnnnnnnnnnnnnnnnnnnnnnnnnnnnnnnnnnnnnnnnnnnnnnnnnnnnnnnnnnnnnnnnnnnnnnnnnnnnnnnnnnnnnnnnnnnnnnnnnnnnnnnnnnnnnnnnnnnnnnnnnnnnnnnnnnnnnnnnnnnnnnnnnnnnnnnnnnnnnnnnnnnnnnnnnnnnnnnnnnnnnnnnnnnnnnnnnnnnnnnnnnnnnnnnnnnnnnnnnnnnnnnnnnnnnnnnnnnnnnnnnnnnnnnnnnnnnnnnnnnnnnnnnnnnnnnnnnnnnnnnnnnnnnnnnnnnnnnnnnnnnnnnnnnnnnnnnnnnnnnnnnnnnnnnnnnnnnnnnnnnnnnnnnnnnnnnnnnnnnnnnnnnnnnnnnnnnnnnnnnnnnnnnnnnnnnnnnnnnnnnnnnnnnnnnnnnnnnnnnnnnnnnnnnnnnnnnnnnnnnnnnnnnnnnnnnnnnnnnnnnnnnnnnnnnnnnnnnnnnnnnnnnnnnnnnnnnnnnnnnnnnnnnnnnnnnnnnnnnnnnnnnnnnnnnnnnnnnnnnnnnnnnnnnnnnnnnnnnnnnnnnnnnnnnnnnnnnnnnnnnnnnnnnnnnnnnnnnnnnnnnnnnnnnnnnnnnnnnnnnnnnnnnnnnnnnnnnnnnnnnnnnnnnnnnnnnnnnnnnnnnnnnnnnnnnnnnnnnnnnnnnnnnnnnnnnnnnnnnnnnnnnnnnnnnnnnnnnnnnnnnnnnnnnnnnnnnnnnnnnnnnnnnnnnnnnnnnnnnnnnnnnnnnnnnnnnnnnnnnnnnnnnnnnnnnnnnnnnnnnnnnnnnnnnnnnnnnnnnnnnnnnnnnnnnnnnnnnnnnnnnnnnnnnnnnnnnnnnnnnnnnnnnnnnnnnnnnnnnnnnnnnnnnnnnnnnnnnnnnnnnnnnnnnnnnnnnnnnnnnnnnnnnnnnnnnnnnnnnnnnnnnnnnnnnnnnnnnnnnnnnnnnnnnnnnnnnnnnnnnnnnnnnnnnnnnnnnnnnnnnnnnnnnnnnnnnnnnnnnnnnnnnnnnnnnnnnnnnnnnnnnnnnnnnnnnnnnnnnnnnnnnnnnnnnnnnnnnnnnnnnnnnnnnnnnnnnnnnnnnnnnnnnnnnnnnnnnnnnnnnnnnnnnnnnnnnnnnnnnnnnnnnnnnnnnnnnnnnnnnnnnnnnnnnnnnnnnnnnnnnnnnnnnnnnnnnnnnnnnnnnnnnnnnnnnnnnnnnnnnnnnnnnnnnnnnnnnnnnnnnnnnnnnnnnnnnnnnnnnnnnnnnnnnnnnnnnnnnnnnnnnnnnnnnnnnnnnnnnnnnnnnnnnnnnnnnnnnnnnnnnnnnnnnnnnnnnnnnnnnnnnnnnnnnnnnnnnnnnnnnnnnnnnnnnnnnnnnnnnnnnnnnnnnnnnnnnnnnnnnnnnnnnnnnnnnnnnnnnnnnnnnnnnnnnnnnnnnnnnnnnnnnnnnnnnnnnnnnnnnnnnnnnnnnnnnnnnnnnnnnnnnnnnnnnnnnnnnnnnnnnnnnnnnnnnnnnnnnnnnnnnnnnnnnnnnnnnnnnnnnnnnnnnnnnnnnnnnnnnnnnnnnnnnnnnnnnnnnnnnnnnnnnnnnnnnnnnnnnnnnnnnnnnnnnnnnnnnnnnnnnnnnnnnnnnnnnnnnnnnnnnnnnnnnnnnnnnnnnnnnnnnnnnnnnnnnnnnnnnnnnnnnnnnnnnnnnnnnnnnnnnnnnnnnnnnnnnnnnnnnnnnnnnnnnnnnnnnnnnnnnnnnnnnnnnnnnnnnnnnnnnnnnnnnnnnnnnnnnnnnnnnnnnnnnnnnnnnnnnnnnnnnnnnnnnnnnnnnnnnnnnnnnnnnnnnnnnnnnnnnnnnnnnnnnnnnnnnnnnnnnnnnnnnnnnnnnnnnnnnnnnnnnnnnnnnnnnnnnnnnnnnnnnnnnnnnnnnnnnnnnnnnnnnnnnnnnnnnnnnnnnnnnnnnnnnnnnnnnnnnnnnnnnnnnnnnnnnnnnnnnnnnnnnnnnnnnnnnnnnnnnnnnnnnnnnnnnnnnnnnnnnnnnnnnnnnnnnnnnnnnnnnnnnnnnnnnnnnnnnnnnnnnnnnnnnnnnnnnnnnnnnnnnnnnnnnnnnnnnnnnnnnnnnnnnnnnnnnnnnnnnnnnnnnnnnnnnnnnnnnnnnnnnnnnnnnnnnnnnnnnnnnnnnnnnnnnnnnnnnnnnnnnnnnnnnnnnnnnnnnnnnnnnnnnnnnnnnnnnnnnnnnnnnnnnnnnnnnnnnnnnnnnnnnnnnnnnnnnnnnnnnnnnnnnnnnnnnnnnnnnnnnnnnnnnnnnnnnnnnnnnnnnnnnnnnnnnnnnnnnnnnnnnnnnnnnnnnnnnnnnnnnnnnnnnnnnnnnnnnnnnnnnnnnnnnnnnnnnnnnnnnnnnnnnnnnnnnnnnnnnnnnnnnnnnnnnnnnnnnnnnnnnnnnnnnnnnnnnnnnnnnnnnnnnnnnnnnnnnnnnnnnnnnnnnnnnnnnnnnnnnnnnnnnnnnnnnnnnnnnnnnnnnnnnnnnnnnnnnnnnnnnnnnnnnnnnnnnnnnnnnnnnnnnnnnnnnnnnnnnnnnnnnnnnnnnnnnnnnnnnnnnnnnnnnnnnnnnnnnnnnnnnnnnnnnnnnnnnnnnnnnnnnnnnnnnnnnnnnnnnnnnnnnnnnnnnnnnnnnnnnnnnnnnnnnnnnnnnnnnnnnnnnnnnnnnnnnnnnnnnnnnnnnnnnnnnnnnnnnnnnnnnnnnnnnnnnnnnnnnnnnnnnnnnnnnnnnnnnnnnnnnnnnnnnnnnnnnnnnnnnnnnnnnnnnnnnnnnnnnnnnnnnnnnnnnnnnnnnnnnnnnnnnnnnnnnnnnnnnnnnnnnnnnnnnnnnnnnnnnnnnnnnnnnnnnnnnnnnnnnnnnnnnnnnnnnnnnnnnnnnnnnnnnnnnnnnnnnnnnnnnnnnnnnnnnnnnnnnnnnnnnnnnnnnnnnnnnnnnnnnnnnnnnnnnnnnnnnnnnnnnnnnnnnnnnnnnnnnnnnnnnnnnnnnnnnnnnnnnnnnnnnnnnnnnnnnnnnnnnnnnnnnnnnnnnnnnnnnnnnnnnnnnnnnnnnnnnnnnnnnnnnnnnnnnnnnnnnnnnnnnnnnnnnnnnnnnnnnnnnnnnnnnnnnnnnnnnnnnnnnnnnnnnnnnnnnnnnnnnnnnnnnnnnnnnnnnnnnnnnnnnnnnnnnnnnnnnnnnnnnnnnnnnnnnnnnnnnnnnnnnnnnnnnnnnnnnnnnnnnnnnnnnnnnnnnnnnnnnnnnnnnnnnnnnnnnnnnnnnnnnnnnnnnnnnnnnnnnnnnnnnnnnnnnnnnnnnnnnnnnnnnnnnnnnnnnnnnnnnnnnnnnnnnnnnnnnnnnnnnnnnnnnnnnnnnnnnnnnnnnnnnnnnnnnnnnnnnnnnnnnnnnnnnnnnnnnnnnnnnnnnnnnnnnnnnnnnnnnnnnnnnnnnnnnnnnnnnnnnnnnnnnnnnnnnnnnnnnnnnnnnnnnnnnnnnnnnnnnnnnnnnnnnnnnnnnnnnnnnnnnnnnnnnnnnnnnnnnnnnnnnnnnnnnnnnnnnnnnnnnnnnnnnnnnnnnnnnnnnnnnnnnnnnnnnnnnnnnnnnnnnnnnnnnnnnnnnnnnnnnnnnnnnnnnnnnnnnnnnnnnnnnnnnnnnnnnnnnnnnnnnnnnnnnnnnnnnnnnnnnnnnnnnnnnnnnnnnnnnnnnnnnnnnnnnnnnnnnnnnnnnnnnnnnnnnnnnnnnnnnnnnnnnnnnnnnnnnnnnnnnnnnnnnnnnnnnnnnnnnnnnnnnnnnnnnnnnnnnnnnnnnnnnnnnnnnnnnnnnnnnnnnnnnnnnnnnnnnnnnnnnnnnnnnnnnnnnnnnnnnnnnnnnnnnnnnnnnnnnnnnnnnnnnnnnnnnnnnnnnnnnnnnnnnnnnnnnnnnnnnnnnnnnnnnnnnnnnnnnnnnnnnnnnnnnnnnnnnnnnnnnnnnnnnnnnnnnnnnnnnnnnnnnnnnnnnnnnnnnnnnnnnnnnnnnnnnnnnnnnnnnnnnnnnnnnnnnnnnnnnnnnnnnnnnnnnnnnnnnnnnnnnnnnnnnnnnnnnnnnnnnnnnnnnnnnnnnnnnnnnnnnnnnnnnnnnnnnnnnnnnnnnnnnnnnnnnnnnnnnnnnnnnnnnnnnnnnnnnnnnnnnnnnnnnnnnnnnnnnnnnnnnnnnnnnnnnnnnnnnnnnnnnnnnnnnnnnnnnnnnnnnnnnnnnnnnnnnnnnnnnnnnnnnnnnnnnnnnnnnnnnnnnnnnnnnnnnnnnnnnnnnnnnnnnnnnnnnnnnnnnnnnnnnnnnnnnnnnnnnnnnnnnnnnnnnnnnnnnnnnnnnnnnnnnnnnnnnnnnnnnnnnnnnnnnnnnnnnnnnnnnnnnnnnnnnnnnnnnnnnnnnnnnnnnnnnnnnnnnnnnnnnnnnnnnnnnnnnnnnnnnnnnnnnnnnnnnnnnnnnnnnnnnnnnnnnnnnnnnnnnnnnnnnnnnnnnnnnnnnnnnnnnnnnnnnnnnnnnnnnnnnnnnnnnnnnnnnnnnnnnnnnnnnnnnnnnnnnnnnnnnnnnnnnnnnnnnnnnnnnnnnnnnnnnnnnnnnnnnnnnnnnnnnnnnnnnnnnnnnnnnnnnnnnnnnnnnnnnnnnnnnnnnnnnnnnnnnnnnnnnnnnnnnnnnnnnnnnnnnnnnnnnnnnnnnnnnnnnnnnnnnnnnnnnnnnnnnnnnnnnnnnnnnnnnnnnnnnnnnnnnnnnnnnnnnnnnnnnnnnnnnnnnnnnnnnnnnnnnnnnnnnnnnnnnnnnnnnnnnnnnnnnnnnnnnnnnnnnnnnnnnnnnnnnnnnnnnnnnnnnnnnnnnnnnnnnnnnnnnnnnnnnnnnnnnnnnnnnnnnnnnnnnnnnnnnnnnnnnnnnnnnnnnnnnnnnnnnnnnnnnnnnnnnnnnnnnnnnnnnnnnnnnnnnnnnnnnnnnnnnnnnnnnnnnnnnnnnnnnnnnnnnnnnnnnnnnnnnnnnnnnnnnnnnnnnnnnnnnnnnnnnnnnnnnnnnnnnnnnnnnnnnnnnnnnnnnnnnnnnnnnnnnnnnnnnnnnnnnnnnnnnnnnnnnnnnnnnnnnnnnnnnnnnnnnnnnnnnnnnnnnnnnnnnnnnnnnnnnnnnnnnnnnnnnnnnnnnnnnnnnnnnnnnnnnnnnnnnnnnnnnnnnnnnnnnnnnnnnnnnnnnnnnnnnnnnnnnnnnnnnnnnnnnnnnnnnnnnnnnnnnnnnnnnnnnnnnnnnnnnnnnnnnnnnnnnnnnnnnnnnnnnnnnnnnnnnnnnnnnnnnnnnnnnnnnnnnnnnnnnnnnnnnnnnnnnnnnnnnnnnnnnnnnnnnnnnnnnnnnnnnnnnnnnnnnnnnnnnnnnnnnnnnnnnnnnnnnnnnnnnnnnnnnnnnnnnnnnnnnnnnnnnnnnnnnnnnnnnnnnnnnnnnnnnnnnnnnnnnnnnnnnnnnnnnnnnnnnnnnnnnnnnnnnnnnnnnnnnnnnnnnnnnnnnnnnnnnnnnnnnnnnnnnnnnnnnnnnnnnnnnnnnnnnnnnnnnnnnnnnnnnnnnnnnnnnnnnnnnnnnnnnnnnnnnnnnnnnnnnnnnnnnnnnnnnnnnnnnnnnnnnnnnnnnnnnnnnnnnnnnnnnnnnnnnnnnnnnnnnnnnnnnnnnnnnnnnnnnnnnnnnnnnnnnnnnnnnnnnnnnnnnnnnnnnnnnnnnnnnnnnnnnnnnnnnnnnnnnnnnnnnnnnnnnnnnnnnnnnnnnnnnnnnnnnnnnnnnnnnnnnnnnnnnnnnnnnnnnnnnnnnnnnnnnnnnnnnnnnnnnnnnnnnnnnnnnnnnnnnnnnnnnnnnnnnnnnnnnnnnnnnnnnnnnnnnnnnnnnnnnnnnnnnnnnnnnnnnnnnnnnnnnnnnnnnnnnnnnnnnnnnnnnnnnnnnnnnnnnnnnnnnnnnnnnnnnnnnnnnnnnnnnnnnnnnnnnnnnnnnnnnnnnnnnnnnnnnnnnnnnnnnnnnnnnnnnnnnnnnnnnnnnnnnnnnnnnnnnnnnnnnnnnnnnnnnnnnnnnnnnnnnnnnnnnnnnnnnnnnnnnnnnnnnnnnnnnnnnnnnnnnnnnnnnnnnnnnnnnnnnnnnnnnnnnnnnnnnnnnnnnnnnnnnnnnnnnnnnnnnnnnnnnnnnnnnnnnnnnnnnnnnnnnnnnnnnnnnnnnnnnnnnnnnnnnnnnnnnnnnnnnnnnnnnnnnnnnnnnnnnnnnnnnnnnnnnnnnnnnnnnnnnnnnnnnnnnnnnnnnnnnnnnnnnnnnnnnnnnnnnnnnnnnnnnnnnnnnnnnnnnnnnnnnnnnnnnnnnnnnnnnnnnnnnnnnnnnnnnnnnnnnnnnnnnnnnnnnnnnnnnnnnnnnnnnnnnnnnnnnnnnnnnnnnnnnnnnnnnnnnnnnnnnnnnnnnnnnnnnnnnnnnnnnnnnnnnnnnnnnnnnnnnnnnnnnnnnnnnnnnnnnnnnnnnnnnnnnnnnnnnnnnnnnnnnnnnnnnnnnnnnnnnnnnnnnnnnnnnnnnnnnnnnnnnnnnnnnnnnnnnnnnnnnnnnnnnnnnnnnnnnnnnnnnnnnnnnnnnnnnnnnnnnnnnnnnnnnnnnnnnnnnnnnnnnnnnnnnnnnnnnnnnnnnnnnnnnnnnnnnnnnnnnnnnnnnnnnnnnnnnnnnnnnnnnnnnnnnnnnnnnnnnnnnnnnnnnnnnnnnnnnnnnnnnnnnnnnnnnnnnnnnnnnnnnnnnnnnnnnnnnnnnnnnnnnnnnnnnnnnnnnnnnnnnnnnnnnnnnnnnnnnnnnnnnnnnnnnnnnnnnnnnnnnnnnnnnnnnnnnnnnnnnnnnnnnnnnnnnnnnnnnnnnnnnnnnnnnnnnnnnnnnnnnnnnnnnnnnnnnnnnnnnnnnnnnnnnnnnnnnnnnnnnnnnnnnnnnnnnnnnnnnnnnnnnnnnnnnnnnnnnnnnnnnnnnnnnnnnnnnnnnnnnnnnnnnnnnnnnnnnnnnnnnnnnnnnnnnnnnnnnnnnnnnnnnnnnnnnnnnnnnnnnnnnnnnnnnnnnnnnnnnnnnnnnnnnnnnnnnnnnnnnnnnnnnnnnnnnnnnnnnnnnnnnnnnnnnnnnnnnnnnnnnnnnnnnnnnnnnnnnnnnnnnnnnnnnnnnnnnnnnnnnnnnnnnnnnnnnnnnnnnnnnnnnnnnnnnnnnnnnnnnnnnnnnnnnnnnnnnnnnnnnnnnnnnnnnnnnnnnnnnnnnnnnnnnnnnnnnnnnnnnnnnnnnnnnnnnnnnnnnnnnnnnnnnnnnnnnnnnnnnnnnnnnnnnnnnnnnnnnnnnnnnnnnnnnnnnnnnnnnnnnnnnnnnnnnnnnnnnnnnnnnnnnnnnnnnnnnnnnnnnnnnnnnnnnnnnnnnnnnnnnnnnnnnnnnnnnnnnnnnnnnnnnnnnnnnnnnnnnnnnnnnnnnnnnnnnnnnnnnnnnnnnnnnnnnnnnnnnnnnnnnnnnnnnnnnnnnnnnnnnnnnnnnnnnnnnnnnnnnnnnnnnnnnnnnnnnnnnnnnnnnnnnnnnnnnnnnnnnnnnnnnnnnnnnnnnnnnnnnnnnnnnnnnnnnnnnnnnnnnnnnnnnnnnnnnnnnnnnnnnnnnnnnnnnnnnnnnnnnnnnnnnnnnnnnnnnnnnnnnnnnnnnnnnnnnnnnnnnnnnnnnnnnnnnnnnnnnnnnnnnnnnnnnnnnnnnnnnnnnnnnnnnnnnnnnnnnnnnnnnnnnnnnnnnnnnnnnnnnnnnnnnnnnnnnnnnnnnnnnnnnnnnnnnnnnnnnnnnnnnnnnnnnnnnnnnnnnnnnnnnnnnnnnnnnnnnnnnnnnnnnnnnnnnnnnnnnnnnnnnnnnnnnnnnnnnnnnnnnnnnnnnnnnnnnnnnnnnnnnnnnnnnnnnnnnnnnnnnnnnnnnnnnnnnnnnnnnnnnnnnnnnnnnnnnnnnnnnnnnnnnnnnnnnnnnnnnnnnnnnnnnnnnnnnnnnnnnnnnnnnnnnnnnnnnnnnnnnnnnnnnnnnnnnnnnnnnnnnnnnnnnnnnnnnnnnnnnnnnnnnnnnnnnnnnnnnnnnnnnnnnnnnnnnnnnnnnnnnnnnnnnnnnnnnnnnnnnnnnnnnnnnnnnnnnnnnnnnnnnnnnnnnnnnnnnnnnnnnnnnnnnnnnnnnnnnnnnnnnnnnnnnnnnnnnnnnnnnnnnnnnnnnnnnnnnnnnnnnnnnnnnnnnnnnnnnnnnnnnnnnnnnnnnnnnnnnnnnnnnnnnnnnnnnnnnnnnnnnnnnnnnnnnnnnnnnnnnnnnnnnnnnnnnnnnnnnnnnnnnnnnnnnnnnnnnnnnnnnnnnnnnnnnnnnnnnnnnnnnnnnnnnnnnnnnnnnnnnnnnnnnnnnnnnnnnnnnnnnnnnnnnnnnnnnnnnnnnnnnnnnnnnnnnnnnnnnnnnnnnnnnnnnnnnnnnnnnnnnnnnnnnnnnnnnnnnnnnnnnnnnnnnnnnnnnnnnnnnnnnnnnnnnnnnnnnnnnnnnnnnnnnnnnnnnnnnnnnnnnnnnnnnnnnnnnnnnnnnnnnnnnnnnnnnnnnnnnnnnnnnnnnnnnnnnnnnnnnnnnnnnnnnnnnnnnnnnnnnnnnnnnnnnnnnnnnnnnnnnnnnnnnnnnnnnnnnnnnnnnnnnnnnnnnnnnnnnnnnnnnnnnnnnnnnnnnnnnnnnnnnnnnnnnnnnnnnnnnnnnnnnnnnnnnnnnnnnnnnnnnnnnnnnnnnnnnnnnnnnnnnnnnnnnnnnnnnnnnnnnnnnnnnnnnnnnnnnnnnnnnnnnnnnnnnnnnnnnnnnnnnnnnnnnnnnnnnnnnnnnnnnnnnnnnnnnnnnnnnnnnnnnnnnnnnnnnnnnnnnnnnnnnnnnnnnnnnnnnnnnnnnnnnnnnnnnnnnnnnnnnnnnnnnnnnnnnnnnnnnnnnnnnnnnnnnnnnnnnnnnnnnnnnnnnnnnnnnnnnnnnnnnnnnnnnnnnnnnnnnnnnnnnnnnnnnnnnnnnnnnnnnnnnnnnnnnnnnnnnnnnnnnnnnnnnnnnnnnnnnnnnnnnnnnnnnnnnnnnnnnnnnnnnnnnnnnnnnnnnnnnnnnnnnnnnnnnnnnnnnnnnnnnnnnnnnnnnnnnnnnnnnnnnnnnnnnnnnnnnnnnnnnnnnnnnnnnnnnnnnnnnnnnnnnnnnnnnnnnnnnnnnnnnnnnnnnnnnnnnnnnnnnnnnnnnnnnnnnnnnnnnnnnnnnnnnnnnnnnnnnnnnnnnnnnnnnnnnnnnnnnnnnnnnnnnnnnnnnnnnnnnnnnnnnnnnnnnnnnnnnnnnnnnnnnnnnnnnnnnnnnnnnnnnnnnnnnnnnnnnnnnnnnnnnnnnnnnnnnnnnnnnnnnnnnnnnnnnnnnnnnnnnnnnnnnnnnnnnnnnnnnnnnnnnnnnnnnnnnnnnnnnnnnnnnnnnnnnnnnnnnnnnnnnnnnnnnnnnnnnnnnnnnnnnnnnnnnnnnnnnnnnnnnnnnnnnnnnnnnnnnnnnnnnnnnnnnnnnnnnnnnnnnnnnnnnnnnnnnnnnnnnnnnnnnnnnnnnnnnnnnnnnnnnnnnnnnnnnnnnnnnnnnnnnnnnnnnnnnnnnnnnnnnnnnnnnnnnnnnnnnnnnnnnnnnnnnnnnnnnnnnnnnnnnnnnnnnnnnnnnnnnnnnnnnnnnnnnnnnnnnnnnnnnnnnnnnnnnnnnnnnnnnnnnnnnnnnnnnnnnnnnnnnnnnnnnnnnnnnnnnnnnnnnnnnnnnnnnnnnnnnnnnnnnnnnnnnnnnnnnnnnnnnnnnnnnnnnnnnnnnnnnnnnnnnnnnnnnnnnnnnnnnnnnnnnnnnnnnnnnnnnnnnnnnnnnnnnnnnnnnnnnnnnnnnnnnnnnnnnnnnnnnnnnnnnnnnnnnnnnnnnnnnnnnnnnnnnnnnnnnnnnnnnnnnnnnnnnnnnnnnnnnnnnnnnnnnnnnnnnnnnnnnnnnnnnnnnnnnnnnnnnnnnnnnnnnnnnnnnnnnnnnnnnnnnnnnnnnnnnnnnnnnnnnnnnnnnnnnnnnnnnnnnnnnnnnnnnnnnnnnnnnnnnnnnnnnnnnnnnnnnnnnnnnnnnnnnnnnnnnnnnnnnnnnnnnnnnnnnnnnnnnnnnnnnnnnnnnnnnnnnnnnnnnnnnnnnnnnnnnnnnnnnnnnnnnnnnnnnnnnnnnnnnnnnnnnnnnnnnnnnnnnnnnnnnnnnnnnnnnnnnnnnnnnnnnnnnnnnnnnnnnnnnnnnnnnnnnnnnnnnnnnnnnnnnnnnnnnnnnnnnnnnnnnnnnnnnnnnnnnnnnnnnnnnnnnnnnnnnnnnnnnnnnnnnnnnnnnnnnnnnnnnnnnnnnnnnnnnnnnnnnnnnnnnnnnnnnnnnnnnnnnnnnnnnnnnnnnnnnnnnnnnnnnnnnnnnnnnnnnnnnnnnnnnnnnnnnnnnnnnnnnnnnnnnnnnnnnnnnnnnnnnnnnnnnnnnnnnnnnnnnnnnnnnnnnnnnnnnnnnnnnnnnnnnnnnnnnnnnnnnnnnnnnnnnnnnnnnnnnnnnnnnnnnnnnnnnnnnnnnnnnnnnnnnnnnnnnnnnnnnnnnnnnnnnnnnnnnnnnnnnnnnnnnnnnnnnnnnnnnnnnnnnnnnnnnnnnnnnnnnnnnnnnnnnnnnnnnnnnnnnnnnnnnnnnnnnnnnnnnnnnnnnnnnnnnnnnnnnnnnnnnnnnnnnnnnnnnnnnnnnnnnnnnnnnnnnnnnnnnnnnnnnnnnnnnnnnnnnnnnnnnnnnnnnnnnnnnnnnnnnnnnnnnnnnnnnnnnnnnnnnnnnnnnnnnnnnnnnnnnnnnnnnnnnnnnnnnnnnnnnnnnnnnnnnnnnnnnnnnnnnnnnnnnnnnnnnnnnnnnnnnnnnnnnnnnnnnnnnnnnnnnnnnnnnnnnnnnnnnnnnnnnnnnnnnnnnnnnnnnnnnnnnnnnnnnnnnnnnnnnnnnnnnnnnnnnnnnnnnnnnnnnnnnnnnnnnnnnnnnnnnnnnnnnnnnnnnnnnnnnnnnnnnnnnnnnnnnnnnnnnnnnnnnnnnnnnnnnnnnnnnnnnnnnnnnnnnnnnnnnnnnnnnnnnnnnnnnnnnnnnnnnnnnnnnnnnnnnnnnnnnnnnnnnnnnnnnnnnnnnnnnnnnnnnnnnnnnnnnnnnnnnnnnnnnnnnnnnnnnnnnnnnnnnnnnnnnnnnnnnnnnnnnnnnnnnnnnnnnnnnnnnnnnnnnnnnnnnnnnnnnnnnnnnnnnnnnnnnnnnnnnnnnnnnnnnnnnnnnnnnnnnnnnnnnnnnnnnnnnnnnnnnnnnnnnnnnnnnnnnnnnnnnnnnnnnnnnnnnnnnnnnnnnnnnnnnnnnnnnnnnnnnnnnnnnnnnnnnnnnnnnnnnnnnnnnnnnnnnnnnnnnnnnnnnnnnnnnnnnnnnnnnnnnnnnnnnnnnnnnnnnnnnnnnnnnnnnnnnnnnnnnnnnnnnnnnnnnnnnnnnnnnnnnnnnnnnnnnnnnnnnnnnnnnnnnnnnnnnnnnnnnnnnnnnnnnnnnnnnnnnnnnnnnnnnnnnnnnnnnnnnnnnnnnnnnnnnnnnnnnnnnnnnnnnnnnnnnnnnnnnnnnnnnnnnnnnnnnnnnnnnnnnnnnnnnnnnnnnnnnnnnnnnnnnnnnnnnnnnnnnnnnnnnnnnnnnnnnnnnnnnnnnnnnnnnnnnnnnnnnnnnnnnnnnnnnnnnnnnnnnnnnnnnnnnnnnnnnnnnnnnnnnnnnnnnnnnnnnnnnnnnnnnnnnnnnnnnnnnnnnnnnnnnnnnnnnnnnnnnnnnnnnnnnnnnnnnnnnnnnnnnnnnnnnnnnnnnnnnnnnnnnnnnnnnnnnnnnnnnnnnnnnnnnnnnnnnnnnnnnnnnnnnnnnnnnnnnnnnnnnnnnnnnnnnnnnnnnnnnnnnnnnnnnnnnnnnnnnnnnnnnnnnnnnnnnnnnnnnnnnnnnnnnnnnnnnnnnnnnnnnnnnnnnnnnnnnnnnnnnnnnnnnnnnnnnnnnnnnnnnnnnnnnnnnnnnnnnnnnnnnnnnnnnnnnnnnnnnnnnnnnnnnnnnnnnnnnnnnnnnnnnnnnnnnnnnnnnnnnnnnnnnnnnnnnnnnnnnnnnnnnnnnnnnnnnnnnnnnnnnnnnnnnnnnnnnnnnnnnnnnnnnnnnnnnnnnnnnnnnnnnnnnnnnnnnnnnnnnnnnnnnnnnnnnnnnnnnnnnnnnnnnnnnnnnnnnnnnnnnnnnnnnnnnnnnnnnnnnnnnnnnnnnnnnnnnnnnnnnnnnnnnnnnnnnnnnnnnnnnnnnnnnnnnnnnnnnnnnnnnnnnnnnnnnnnnnnnnnnnnnnnnnnnnnnnnnnnnnnnnnnnnnnnnnnnnnnnnnnnnnnnnnnnnnnnnnnnnnnnnnnnnnnnnnnnnnnnnnnnnnnnnnnnnnnnnnnnnnnnnnnnnnnnnnnnnnnnnnnnnnnnnnnnnnnnnnnnnnnnnnnnnnnnnnnnnnnnnnnnnnnnnnnnnnnnnnnnnnnnnnnnnnnnnnnnnnnnnnnnnnnnnnnnnnnnnnnnnnnnnnnnnnnnnnnnnnnnnnnnnnnnnnnnnnnnnnnnnnnnnnnnnnnnnnnnnnnnnnnnnnnnnnnnnnnnnnnnnnnnnnnnnnnnnnnnnnnnnnnnnnnnnnnnnnnnnnnnnnnnnnnnnnnnnnnnnnnnnnnnnnnnnnnnnnnnnnnnnnnnnnnnnnnnnnnnnnnnnnnnnnnnnnnnnnnnnnnnnnnnnnnnnnnnnnnnnnnnnnnnnnnnnnnnnnnnnnnnnnnnnnnnnnnnnnnnnnnnnnnnnnnnnnnnnnnnnnnnnnnnnnnnnnnnnnnnnnnnnnnnnnnnnnnnnnnnnnnnnnnnnnnnnnnnnnnnnnnnnnnnnnnnnnnnnnnnnnnnnnnnnnnnnnnnnnnnnnnnnnnnnnnnnnnnnnnnnnnnnnnnnnnnnnnnnnnnnnnnnnnnnnnnnnnnnnnnnnnnnnnnnnnnnnnnnnnnnnnnnnnnnnnnnnnnnnnnnnnnnnnnnnnnnnnnnnnnnnnnnnnnnnnnnnnnnnnnnnnnnnnnnnnnnnnnnnnnnnnnnnnnnnnnnnnnnnnnnnnnnnnnnnnnnnnnnnnnnnnnnnnnnnnnnnnnnnnnnnnnnnnnnnnnnnnnnnnnnnnnnnnnnnnnnnnnnnnnnnnnnnnnnnnnnnnnnnnnnnnnnnnnnnnnnnnnnnnnnnnnnnnnnnnnnnnnnnnnnnnnnnnnnnnnnnnnnnnnnnnnnnnnnnnnnnnnnnnnnnnnnnnnnnnnnnnnnnnnnnnnnnnnnnnnnnnnnnnnnnnnnnnnnnnnnnnnnnnnnnnnnnnnnnnnnnnnnnnnnnnnnnnnnnnnnnnnnnnnnnnnnnnnnnnnnnnnnnnnnnnnnnnnnnnnnnnnnnnnnnnnnnnnnnnnnnnnnnnnnnnnnnnnnnnnnnnnnnnnnnnnnnnnnnnnnnnnnnnnnnnnnnnnnnnnnnnnnnnnnnnnnnnnnnnnnnnnnnnnnnnnnnnnnnnnnnnnnnnnnnnnnnnnnnnnnnnnnnnnnnnnnnnnnnnnnnnnnnnnnnnnnnnnnnnnnnnnnnnnnnnnnnnnnnnnnnnnnnnnnnnnnnnnnnnnnnnnnnnnnnnnnnnnnnnnnnnnnnnnnnnnnnnnnnnnnnnnnnnnnnnnnnnnnnnnnnnnnnnnnnnnnnnnnnnnnnnnnnnnnnnnnnnnnnnnnnnnnnnnnnnnnnnnnnnnnnnnnnnnnnnnnnnnnnnnnnnnnnnnnnnnnnnnnnnnnnnnnnnnnnnnnnnnnnnnnnnnnnnnnnnnnnnnnnnnnnnnnnnnnnnnnnnnnnnnnnnnnnnnnnnnnnnnnnnnnnnnnnnnnnnnnnnnnnnnnnnnnnnnnnnnnnnnnnnnnnnnnnnnnnnnnnnnnnnnnnnnnnnnnnnnnnnnnnnnnnnnnnnnnnnnnnnnnnnnnnnnnnnnnnnnnnnnnnnnnnnnnnnnnnnnnnnnnnnnnnnnnnnnnnnnnnnnnnnnnnnnnnnnnnnnnnnnnnnnnnnnnnnnnnnnnnnnnnnnnnnnnnnnnnnnnnnnnnnnnnnnnnnnnnnnnnnnnnnnnnnnnnnnnnnnnnnnnnnnnnnnnnnnnnnnnnnnnnnnnnnnnnnnnnnnnnnnnnnnnnnnnnnnnnnnnnnnnnnnnnnnnnnnnnnnnnnnnnnnnnnnnnnnnnnnnnnnnnnnnnnnnnnnnnnnnnnnnnnnnnnnnnnnnnnnnnnnnnnnnnnnnnnnnnnnnnnnnnnnnnnnnnnnnnnnnnnnnnnnnnnnnnnnnnnnnnnnnnnnnnnnnnnnnnnnnnnnnnnnnnnnnnnnnnnnnnnnnnnnnnnnnnnnnnnnnnnnnnnnnnnnnnnnnnnnnnnnnnnnnnnnnnnnnnnnnnnnnnnnnnnnnnnnnnnnnnnnnnnnnnnnnnnnnnnnnnnnnnnnnnnnnnnnnnnnnnnnnnnnnnnnnnnnnnnnnnnnnnnnnnnnnnnnnnnnnnnnnnnnnnnnnnnnnnnnnnnnnnnnnnnnnnnnnnnnnnnnnnnnnnnnnnnnnnnnnnnnnnnnnnnnnnnnnnnnnnnnnnnnnnnnnnnnnnnnnnnnnnnnnnnnnnnnnnnnnnnnnnnnnnnnnnnnnnnnnnnnnnnnnnnnnnnnnnnnnnnnnnnnnnnnnnnnnnnnnnnnnnnnnnnnnnnnnnnnnnnnnnnnnnnnnnnnnnnnnnnnnnnnnnnnnnnnnnnnnnnnnnnnnnnnnnnnnnnnnnnnnnnnnnnnnnnnnnnnnnnnnnnnnnnnnnnnnnnnnnnnnnnnnnnnnnnnnnnnnnnnnnnnnnnnnnnnnnnnnnnnnnnnnnnnnnnnnnnnnnnnnnnnnnnnnnnnnnnnnnnnnnnnnnnnnnnnnnnnnnnnnnnnnnnnnnnnnnnnnnnnnnnnnnnnnnnnnnnnnnnnnnnnnnnnnnnnnnnnnnnnnnnnnnnnnnnnnnnnnnnnnnnnnnnnnnnnnnnnnnnnnnnnnnnnnnnnnnnnnnnnnnnnnnnnnnnnnnnnnnnnnnnnnnnnnnnnnnnnnnnnnnnnnnnnnnnnnnnnnnnnnnnnnnnnnnnnnnnnnnnnnnnnnnnnnnnnnnnnnnnnnnnnnnnnnnnnnnnnnnnnnnnnnnnnnnnnnnnnnnnnnnnnnnnnnnnnnnnnnnnnnnnnnnnnnnnnnnnnnnnnnnnnnnnnnnnnnnnnnnnnnnnnnnnnnnnnnnnnnnnnnnnnnnnnnnnnnnnnnnnnnnnnnnnnnnnnnnnnnnnnnnnnnnnnnnnnnnnnnnnnnnnnnnnnnnnnnnnnnnnnnnnnnnnnnnnnnnnnnnnnnnnnnnnnnnnnnnnnnnnnnnnnnnnnnnnnnnnnnnnnnnnnnnnnnnnnnnnnnnnnnnnnnnnnnnnnnnnnnnnnnnnnnnnnnnnnnnnnnnnnnnnnnnnnnnnnnnnnnnnnnnnnnnnnnnnnnnnnnnnnnnnnnnnnnnnnnnnnnnnnnnnnnnnnnnnnnnnnnnnnnnnnnnnnnnnnnnnnnnnnnnnnnnnnnnnnnnnnnnnnnnnnnnnnnnnnnnnnnnnnnnnnnnnnnnnnnnnnnnnnnnnnnnnnnnnnnnnnnnnnnnnnnnnnnnnnnnnnnnnnnnnnnnnnnnnnnnnnnnnnnnnnnnnnnnnnnnnnnnnnnnnnnnnnnnnnnnnnnnnnnnnnnnnnnnnnnnnnnnnnnnnnnnnnnnnnnnnnnnnnnnnnnnnnnnnnnnnnnnnnnnnnnnnnnnnnnnnnnnnnnnnnnnnnnnnnnnnnnnnnnnnnnnnnnnnnnnnnnnnnnnnnnnnnnnnnnnnnnnnnnnnnnnnnnnnnnnnnnnnnnnnnnnnnnnnnnnnnnnnnnnnnnnnnnnnnnnnnnnnnnnnnnnnnnnnnnnnnnnnnnnnnnnnnnnnnnnnnnnnnnnnnnnnnnnnnnnnnnnnnnnnnnnnnnnnnnnnnnnnnnnnnnnnnnnnnnnnnnnnnnnnnnnnnnnnnnnnnnnnnnnnnnnnnnnnnnnnnnnnnnnnnnnnnnnnnnnnnnnnnnnnnnnnnnnnnnnnnnnnnnnnnnnnnnnnnnnnnnnnnnnnnnnnnnnnnnnnnnnnnnnnnnnnnnnnnnnnnnnnnnnnnnnnnnnnnnnnnnnnnnnnnnnnnnnnnnnnnnnnnnnnnnnnnnnnnnnnnnnnnnnnnnnnnnnnnnnnnnnnnnnnnnnnnnnnnnnnnnnnnnnnnnnnnnnnnnnnnnnnnnnnnnnnnnnnnnnnnnnnnnnnnnnnnnnnnnnnnnnnnnnnnnnnnnnnnnnnnnnnnnnnnnnnnnnnnnnnnnnnnnnnnnnnnnnnnnnnnnnnnnnnnnnnnnnnnnnnnnnnnnnnnnnnnnnnnnnnnnnnnnnnnnnnnnnnnnnnnnnnnnnnnnnnnnnnnnnnnnnnnnnnnnnnnnnnnnnnnnnnnnnnnnnnnnnnnnnnnnnnnnnnnnnnnnnnnnnnnnnnnnnnnnnnnnnnnnnnnnnnnnnnnnnnnnnnnnnnnnnnnnnnnnnnnnnnnnnnnnnnnnnnnnnnnnnnnnnnnnnnnnnnnnnnnnnnnnnnnnnnnnnnnnnnnnnnnnnnnnnnnnnnnnnnnnnnnnnnnnnnnnnnnnnnnnnnnnnnnnnnnnnnnnnnnnnnnnnnnnnnnnnnnnnnnnnnnnnnnnnnnnnnnnnnnnnnnnnnnnnnnnnnnnnnnnnnnnnnnnnnnnnnnnnnnnnnnnnnnnnnnnnnnnnnnnnnnnnnnnnnnnnnnnnnnnnnnnnnnnnnnnnnnnnnnnnnnnnnnnnnnnnnnnnnnnnnnnnnnnnnnnnnnnnnnnnnnnnnnnnnnnnnnnnnnnnnnnnnnnnnnnnnnnnnnnnnnnnnnnnnnnnnnnnnnnnnnnnnnnnnnnnnnnnnnnnnnnnnnnnnnnnnnnnnnnnnnnnnnnnnnnnnnnnnnnnnnnnnnnnnnnnnnnnnnnnnnnnnnnnnnnnnnnnnnnnnnnnnnnnnnnnnnnnnnnnnnnnnnnnnnnnnnnnnnnnnnnnnnnnnnnnnnnnnnnnnnnnnnnnnnnnnnnnnnnnnnnnnnnnnnnnnnnnnnnnnnnnnnnnnnnnnnnnnnnnnnnnnnnnnnnnnnnnnnnnnnnnnnnnnnnnnnnnnnnnnnnnnnnnnnnnnnnnnnnnnnnnnnnnnnnnnnnnnnnnnnnnnnnnnnnnnnnnnnnnnnnnnnnnnnnnnnnnnnnnnnnnnnnnnnnnnnnnnnnnnnnnnnnnnnnnnnnnnnnnnnnnnnnnnnnnnnnnnnnnnnnnnnnnnnnnnnnnnnnnnnnnnnnnnnnnnnnnnnnnnnnnnnnnnnnnnnnnnnnnnnnnnnnnnnnnnnnnnnnnnnnnnnnnnnnnnnnnnnnnnnnnnnnnnnnnnnnnnnnnnnnnnnnnnnnnnnnnnnnnnnnnnnnnnnnnnnnnnnnnnnnnnnnnnnnnnnnnnnnnnnnnnnnnnnnnnnnnnnnnnnnnnnnnnnnnnnnnnnnnnnnnnnnnnnnnnnnnnnnnnnnnnnnnnnnnnnnnnnnnnnnnnnnnnnnnnnnnnnnnnnnnnnnnnnnnnnnnnnnnnnnnnnnnnnnnnnnnnnnnnnnnnnnnnnnnnnnnnnnnnnnnnnnnnnnnnnnnnnnnnnnnnnnnnnnnnnnnnnnnnnnnnnnnnnnnnnnnnnnnnnnnnnnnnnnnnnnnnnnnnnnnnnnnnnnnnnnnnnnnnnnnnnnnnnnnnnnnnnnnnnnnnnnnnnnnnnnnnnnnnnnnnnnnnnnnnnnnnnnnnnnnnnnnnnnnnnnnnnnnnnnnnnnnnnnnnnnnnnnnnnnnnnnnnnnnnnnnnnnnnnnnnnnnnnnnnnnnnnnnnnnnnnnnnnnnnnnnnnnnnnnnnnnnnnnnnnnnnnnnnnnnnnnnnnnnnnnnnnnnnnnnnnnnnnnnnnnnnnnnnnnnnnnnnnnnnnnnnnnnnnnnnnnnnnnnnnnnnnnnnnnnnnnnnnnnnnnnnnnnnnnnnnnnnnnnnnnnnnnnnnnnnnnnnnnnnnnnnnnnnnnnnnnnnnnnnnnnnnnnnnnnnnnnnnnnnnnnnnnnnnnnnnnnnnnnnnnnnnnnnnnnnnnnnnnnnnnnnnnnnnnnnnnnnnnnnnnnnnnnnnnnnnnnnnnnnnnnnnnnnnnnnnnnnnnnnnnnnnnnnnnnnnnnnnnnnnnnnnnnnnnnnnnnnnnnnnnnnnnnnnnnnnnnnnnnnnnnnnnnnnnnnnnnnnnnnnnnnnnnnnnnnnnnnnnnnnnnnnnnnnnnnnnnnnnnnnnnnnnnnnnnnnnnnnnnnnnnnnnnnnnnnnnnnnnnnnnnnnnnnnnnnnnnnnnnnnnnnnnnnnnnnnnnnnnnnnnnnnnnnnnnnnnnnnnnnnnnnnnnnnnnnnnnnnnnnnnnnnnnnnnnnnnnnnnnnnnnnnnnnnnnnnnnnnnnnnnnnnnnnnnnnnnnnnnnnnnnnnnnnnnnnnnnnnnnnnnnnnnnnnnnnnnnnnnnnnnnnnnnnnnnnnnnnnnnnnnnnnnnnnnnnnnnnnnnnnnnnnnnnnnnnnnnnnnnnnnnnnnnnnnnnnnnnnnnnnnnnnnnnnnnnnnnnnnnnnnnnnnnnnnnnnnnnnnnnnnnnnnnnnnnnnnnnnnnnnnnnnnnnnnnnnnnnnnnnnnnnnnnnnnnnnnnnnnnnnnnnnnnnnnnnnnnnnnnnnnnnnnnnnnnnnnnnnnnnnnnnnnnnnnnnnnnnnnnnnnnnnnnnnnnnnnnnnnnnnnnnnnnnnnnnnnnnnnnnnnnnnnnnnnnnnnnnnnnnnnnnnnnnnnnnnnnnnnnnnnnnnnnnnnnnnnnnnnnnnnnnnnnnnnnnnnnnnnnnnnnnnnnnnnnnnnnnnnnnnnnnnnnnnnnnnnnnnnnnnnnnnnnnnnnnnnnnnnnnnnnnnnnnnnnnnnnnnnnnnnnnnnnnnnnnnnnnnnnnnnnnnnnnnnnnnnnnnnnnnnnnnnnnnnnnnnnnnnnnnnnnnnnnnnnnnnnnnnnnnnnnnnnnnnnnnnnnnnnnnnnnnnnnnnnnnnnnnnnnnnnnnnnnnnnnnnnnnnnnnnnnnnnnnnnnnnnnnnnnnnnnnnnnnnnnnnnnnnnnnnnnnnnnnnnnnnnnnnnnnnnnnnnnnnnnnnnnnnnnnnnnnnnnnnnnnnnnnnnnnnnnnnnnnnnnnnnnnnnnnnnnnnnnnnnnnnnnnnnnnnnnnnnnnnnnnnnnnnnnnnnnnnnnnnnnnnnnnnnnnnnnnnnnnnnnnnnnnnnnnnnnnnnnnnnnnnnnnnnnnnnnnnnnnnnnnnnnnnnnnnnnnnnnnnnnnnnnnnnnnnnnnnnnnnnnnnnnnnnnnnnnnnnnnnnnnnnnnnnnnnnnnnnnnnnnnnnnnnnnnnnnnnnnnnnnnnnnnnnnnnnnnnnnnnnnnnnnnnnnnnnnnnnnnnnnnnnnnnnnnnnnnnnnnnnnnnnnnnnnnnnnnnnnnnnnnnnnnnnnnnnnnnnnnnnnnnnnnnnnnnnnnnnnnnnnnnnnnnnnnnnnnnnnnnnnnnnnnnnnnnnnnnnnnnnnnnnnnnnnnnnnnnnnnnnnnnnnnnnnnnnnnnnnnnnnnnnnnnnnnnnnnnnnnnnnnnnnnnnnnnnnnnnnnnnnnnnnnnnnnnnnnnnnnnnnnnnnnnnnnnnnnnnnnnnnnnnnnnnnnnnnnnnnnnnnnnnnnnnnnnnnnnnnnnnnnnnnnnnnnnnnnnnnnnnnnnnnnnnnnnnnnnnnnnnnnnnnnnnnnnnnnnnnnnnnnnnnnnnnnnnnnnnnnnnnnnnnnnnnnnnnnnnnnnnnnnnnnnnnnnnnnnnnnnnnnnnnnnnnnnnnnnnnnnnnnnnnnnnnnnnnnnnnnnnnnnnnnnnnnnnnnnnnnnnnnnnnnnnnnnnnnnnnnnnnnnnnnnnnnnnnnnnnnnnnnnnnnnnnnnnnnnnnnnnnnnnnnnnnnnnnnnnnnnnnnnnnnnnnnnnnnnnnnnnnnnnnnnnnnnnnnnnnnnnnnnnnnnnnnnnnnnnnnnnnnnnnnnnnnnnnnnnnnnnnnnnnnnnnnnnnnnnnnnnnnnnnnnnnnnnnnnnnnnnnnnnnnnnnnnnnnnnnnnnnnnnnnnnnnnnnnnnnnnnnnnnnnnnnnnnnnnnnnnnnnnnnnnnnnnnnnnnnnnnnnnnnnnnnnnnnnnnnnnnnnnnnnnnnnnnnnnnnnnnnnnnnnnnnnnnnnnnnnnnnnnnnnnnnnnnnnnnnnnnnnnnnnnnnnnnnnnnnnnnnnnnnnnnnnnnnnnnnnnnnnnnnnnnnnnnnnnnnnnnnnnnnnnnnnnnnnnnnnnnnnnnnnnnnnnnnnnnnnnnnnnnnnnnnnnnnnnnnnnnnnnnnnnnnnnnnnnnnnnnnnnnnnnnnnnnnnnnnnnnnnnnnnnnnnnnnnnnnnnnnnnnnnnnnnnnnnnnnnnnnnnnnnnnnnnnnnnnnnnnnnnnnnnnnnnnnnnnnnnnnnnnnnnnnnnnnnnnnnnnnnnnnnnnnnnnnnnnnnnnnnnnnnnnnnnnnnnnnnnnnnnnnnnnnnnnnnnnnnnnnnnnnnnnnnnnnnnnnnnnnnnnnnnnnnnnnnnnnnnnnnnnnnnnnnnnnnnnnnnnnnnnnnnnnnnnnnnnnnnnnnnnnnnnnnnnnnnnnnnnnnnnnnnnnnnnnnnnnnnnnnnnnnnnnnnnnnnnnnnnnnnnnnnnnnnnnnnnnnnnnnnnnnnnnnnnnnnnnnnnnnnnnnnnnnnnnnnnnnnnnnnnnnnnnnnnnnnnnnnnnnnnnnnnnnnnnnnnnnnnnnnnnnnnnnnnnnnnnnnnnnnnnnnnnnnnnnnnnnnnnnnnnnnnnnnnnnnnnnnnnnnnnnnnnnnnnnnnnnnnnnnnnnnnnnnnnnnnnnnnnnnnnnnnnnnnnnnnnnnnnnnnnnnnnnnnnnnnnnnnnnnnnnnnnnnnnnnnnnnnnnnnnnnnnnnnnnnnnnnnnnnnnnnnnnnnnnnnnnnnnnnnnnnnnnnnnnnnnnnnnnnnnnnnnnnnnnnnnnnnnnnnnnnnnnnnnnnnnnnnnnnnnnnnnnnnnnnnnnnnnnnnnnnnnnnnnnnnnnnnnnnnnnnnnnnnnnnnnnnnnnnnnnnnnnnnnnnnnnnnnnnnnnnnnnnnnnnnnnnnnnnnnnnnnnnnnnnnnnnnnnnnnnnnnnnnnnnnnnnnnnnnnnnnnnnnnnnnnnnnnnnnnnnnnnnnnnnnnnnnnnnnnnnnnnnnnnnnnnnnnnnnnnnnnnnnnnnnnnnnnnnnnnnnnnnnnnnnnnnnnnnnnnnnnnnnnnnnnnnnnnnnnnnnnnnnnnnnnnnnnnnnnnnnnnnnnnnnnnnnnnnnnnnnnnnnnnnnnnnnnnnnnnnnnnnnnnnnnnnnnnnnnnnnnnnnnnnnnnnnnnnnnnnnnnnnnnnnnnnnnnnnnnnnnnnnnnnnnnnnnnnnnnnnnnnnnnnnnnnnnnnnnnnnnnnnnnnnnnnnnnnnnnnnnnnnnnnnnnnnnnnnnnnnnnnnnnnnnnnnnnnnnnnnnnnnnnnnnnnnnnnnnnnnnnnnnnnnnnnnnnnnnnnnnnnnnnnnnnnnnnnnnnnnnnnnnnnnnnnnnnnnnnnnnnnnnnnnnnnnnnnnnnnnnnnnnnnnnnnnnnnnnnnnnnnnnnnnnnnnnnnnnnnnnnnnnnnnnnnnnnnnnnnnnnnnnnnnnnnnnnnnnnnnnnnnnnnnnnnnnnnnnnnnnnnnnnnnnnnnnnnnnnnnnnnnnnnnnnnnnnnnnnnnnnnnnnnnnnnnnnnnnnnnnnnnnnnnnnnnnnnnnnnnnnnnnnnnnnnnnnnnnnnnnnnnnnnnnnnnnnnnnnnnnnnnnnnnnnnnnnnnnnnnnnnnnnnnnnnnnnnnnnnnnnnnnnnnnnnnnnnnnnnnnnnnnnnnnnnnnnnnnnnnnnnnnnnnnnnnnnnnnnnnnnnnnnnnnnnnnnnnnnnnnnnnnnnnnnnnnnnnnnnnnnnnnnnnnnnnnnnnnnnnnnnnnnnnnnnnnnnnnnnnnnnnnnnnnnnnnnnnnnnnnnnnnnnnnnnnnnnnnnnnnnnnnnnnnnnnnnnnnnnnnnnnnnnnnnnnnnnnnnnnnnnnnnnnnnnnnnnnnnnnnnnnnnnnnnnnnnnnnnnnnnnnnnnnnnnnnnnnnnnnnnnnnnnnnnnnnnnnnnnnnnnnnnnnnnnnnnnnnnnnnnnnnnnnnnnnnnnnnnnnnnnnnnnnnnnnnnnnnnnnnnnnnnnnnnnnnnnnnnnnnnnnnnnnnnnnnnnnnnnnnnnnnnnnnnnnnnnnnnnnnnnnnnnnnnnnnnnnnnnnnnnnnnnnnnnnnnnnnnnnnnnnnnnnnnnnnnnnnnnnnnnnnnnnnnnnnnnnnnnnnnnnnnnnnnnnnnnnnnnnnnnnnnnnnnnnnnnnnnnnnnnnnnnnnnnnnnnnnnnnnnnnnnnnnnnnnnnnnnnnnnnnnnnnnnnnnnnnnnnnnnnnnnnnnnnnnnnnnnnnnnnnnnnnnnnnnnnnnnnnnnnnnnnnnnnnnnnnnnnnnnnnnnnnnnnnnnnnnnnnnnnnnnnnnnnnnnnnnnnnnnnnnnnnnnnnnnnnnnnnnnnnnnnnnnnnnnnnnnnnnnnnnnnnnnnnnnnnnnnnnnnnnnnnnnnnnnnnnnnnnnnnnnnnnnnnnnnnnnnnnnnnnnnnnnnnnnnnnnnnnnnnnnnnnnnnnnnnnnnnnnnnnnnnnnnnnnnnnnnnnnnnnnnnnnnnnnnnnnnnnnnnnnnnnnnnnnnnnnnnnnnnnnnnnnnnnnnnnnnnnnnnnnnnnnnnnnnnnnnnnnnnnnnnnnnnnnnnnnnnnnnnnnnnnnnnnnnnnnnnnnnnnnnnnnnnnnnnnnnnnnnnnnnnnnnnnnnnnnnnnnnnnnnnnnnnnnnnnnnnnnnnnnnnnnnnnnnnnnnnnnnnnnnnnnnnnnnnnnnnnnnnnnnnnnnnnnnnnnnnnnnnnnnnnnnnnnnnnnnnnnnnnnnnnnnnnnnnnnnnnnnnnnnnnnnnnnnnnnnnnnnnnnnnnnnnnnnnnnnnnnnnnnnnnnnnnnnnnnnnnnnnnnnnnnnnnnnnnnnnnnnnnnnnnnnnnnnnnnnnnnnnnnnnnnnnnnnnnnnnnnnnnnnnnnnnnnnnnnnnnnnnnnnnnnnnnnnnnnnnnnnnnnnnnnnnnnnnnnnnnnnnnnnnnnnnnnnnnnnnnnnnnnnnnnnnnnnnnnnnnnnnnnnnnnnnnnnnnnnnnnnnnnnnnnnnnnnnnnnnnnnnnnnnnnnnnnnnnnnnnnnnnnnnnnnnnnnnnnnnnnnnnnnnnnnnnnnnnnnnnnnnnnnnnnnnnnnnnnnnnnnnnnnnnnnnnnnnnnnnnnnnnnnnnnnnnnnnnnnnnnnnnnnnnnnnnnnnnnnnnnnnnnnnnnnnnnnnnnnnnnnnnnnnnnnnnnnnnnnnnnnnnnnnnnnnnnnnnnnnnnnnnnnnnnnnnnnnnnnnnnnnnnnnnnnnnnnnnnnnnnnnnnnnnnnnnnnnnnnnnnnnnnnnnnnnnnnnnnnnnnnnnnnnnnnnnnnnnnnnnnnnnnnnnnnnnnnnnnnnnnnnnnnnnnnnnnnnnnnnnnnnnnnnnnnnnnnnnnnnnnnnnnnnnnnnnnnnnnnnnnnnnnnnnnnnnnnnnnnnnnnnnnnnnnnnnnnnnnnnnnnnnnnnnnnnnnnnnnnnnnnnnnnnnnnnnnnnnnnnnnnnnnnnnnnnnnnnnnnnnnnnnnnnnnnnnnnnnnnnnnnnnnnnnnnnnnnnnnnnnnnnnnnnnnnnnnnnnnnnnnnnnnnnnnnnnnnnnnnnnnnnnnnnnnnnnnnnnnnnnnnnnnnnnnnnnnnnnnnnnnnnnnnnnnnnnnnnnnnnnnnnnnnnnnnnnnnnnnnnnnnnnnnnnnnnnnnnnnnnnnnnnnnnnnnnnnnnnnnnnnnnnnnnnnnnnnnnnnnnnnnnnnnnnnnnnnnnnnnnnnnnnnnnnnnnnnnnnnnnnnnnnnnnnnnnnnnnnnnnnnnnnnnnnnnnnnnnnnnnnnnnnnnnnnnnnnnnnnnnnnnnnnnnnnnnnnnnnnnnnnnnnnnnnnnnnnnnnnnnnnnnnnnnnnnnnnnnnnnnnnnnnnnnnnnnnnnnnnnnnnnnnnnnnnnnnnnnnnnnnnnnnnnnnnnnnnnnnnnnnnnnnnnnnnnnnnnnnnnnnnnnnnnnnnnnnnnnnnnnnnnnnnnnnnnnnnnnnnnnnnnnnnnnnnnnnnnnnnnnnnnnnnnnnnnnnnnnnnnnnnnnnnnnnnnnnnnnnnnnnnnnnnnnnnnnnnnnnnnnnnnnnnnnnnnnnnnnnnnnnnnnnnnnnnnnnnnnnnnnnnnnnnnnnnnnnnnnnnnnnnnnnnnnnnnnnnnnnnnnnnnnnnnnnnnnnnnnnnnnnnnnnnnnnnnnnnnnnnnnnnnnnnnnnnnnnnnnnnnnnnnnnnnnnnnnnnnnnnnnnnnnnnnnnnnnnnnnnnnnnnnnnnnnnnnnnnnnnnnnnnnnnnnnnnnnnnnnnnnnnnnnnnnnnnnnnnnnnnnnnnnnnnnnnnnnnnnnnnnnnnnnnnnnnnnnnnnnnnnnnnnnnnnnnnnnnnnnnnnnnnnnnnnnnnnnnnnnnnnnnnnnnnnnnnnnnnnnnnnnnnnnnnnnnnnnnnnnnnnnnnnnnnnnnnnnnnnnnnnnnnnnnnnnnnnnnnnnnnnnnnnnnnnnnnnnnnnnnnnnnnnnnnnnnnnnnnnnnnnnnnnnnnnnnnnnnnnnnnnnnnnnnnnnnnnnnnnnnnnnnnnnnnnnnnnnnnnnnnnnnnnnnnnnnnnnnnnnnnnnnnnnnnnnnnnnnnnnnnnnnnnnnnnnnnnnnnnnnnnnnnnnnnnnnnnnnnnnnnnnnnnnnnnnnnnnnnnnnnnnnnnnnnnnnnnnnnnnnnnnnnnnnnnnnnnnnnnnnnnnnnnnnnnnnnnnnnnnnnnnnnnnnnnnnnnnnnnnnnnnnnnnnnnnnnnnnnnnnnnnnnnnnnnnnnnnnnnnnnnnnnnnnnnnnnnnnnnnnnnnnnnnnnnnnnnnnnnnnnnnnnnnnnnnnnnnnnnnnnnnnnnnnnnnnnnnnnnnnnnnnnnnnnnnnnnnnnnnnnnnnnnnnnnnnnnnnnnnnnnnnnnnnnnnnnnnnnnnnnnnnnnnnnnnnnnnnnnnnnnnnnnnnnnnnnnnnnnnnnnnnnnnnnnnnnnnnnnnnnnnnnnnnnnnnnnnnnnnnnnnnnnnnnnnnnnnnnnnnnnnnnnnnnnnnnnnnnnnnnnnnnnnnnnnnnnnnnnnnnnnnnnnnnnnnnnnnnnnnnnnnnnnnnnnnnnnnnnnnnnnnnnnnnnnnnnnnnnnnnnnnnnnnnnnnnnnnnnnnnnnnnnnnnnnnnnnnnnnnnnnnnnnnnnnnnnnnnnnnnnnnnnnnnnnnnnnnnnnnnnnnnnnnnnnnnnnnnnnnnnnnnnnnnnnnnnnnnnnnnnnnnnnnnnnnnnnnnnnnnnnnnnnnnnnnnnnnnnnnnnnnnnnnnnnnnnnnnnnnnnnnnnnnnnnnnnnnnnnnnnnnnnnnnnnnnnnnnnnnnnnnnnnnnnnnnnnnnnnnnnnnnnnnnnnnnnnnnnnnnnnnnnnnnnnnnnnnnnnnnnnnnnnnnnnnnnnnnnnnnnnnnnnnnnnnnnnnnnnnnnnnnnnnnnnnnnnnnnnnnnnnnnnnnnnnnnnnnnnnnnnnnnnnnnnnnnnnnnnnnnnnnnnnnnnnnnnnnnnnnnnnnnnnnnnnnnnnnnnnnnnnnnnnnnnnnnnnnnnnnnnnnnnnnnnnnnnnnnnnnnnnnnnnnnnnnnnnnnnnnnnnnnnnnnnnnnnnnnnnnnnnnnnnnnnnnnnnnnnnnnnnnnnnnnnnnnnnnnnnnnnnnnnnnnnnnnnnnnnnnnnnnnnnnnnnnnnnnnnnnnnnnnnnnnnnnnnnnnnnnnnnnnnnnnnnnnnnnnnnnnnnnnnnnnnnnnnnnnnnnnnnnnnnnnnnnnnnnnnnnnnnnnnnnnnnnnnnnnnnnnnnnnnnnnnnnnnnnnnnnnnnnnnnnnnnnnnnnnnnnnnnnnnnnnnnnnnnnnnnnnnnnnnnnnnnnnnnnnnnnnnnnnnnnnnnnnnnnnnnnnnnnnnnnnnnnnnnnnnnnnnnnnnnnnnnnnnnnnnnnnnnnnnnnnnnnnnnnnnnnnnnnnnnnnnnnnnnnnnnnnnnnnnnnnnnnnnnnnnnnnnnnnnnnnnnnnnnnnnnnnnnnnnnnnnnnnnnnnnnnnnnnnnnnnnnnnnnnnnnnnnnnnnnnnnnnnnnnnnnnnnnnnnnnnnnnnnnnnnnnnnnnnnnnnnnnnnnnnnnnnnnnnnnnnnnnnnnnnnnnnnnnnnnnnnnnnnnnnnnnnnnnnnnnnnnnnnnnnnnnnnnnnnnnnnnnnnnnnnnnnnnnnnnnnnnnnnnnnnnnnnnnnnnnnnnnnnnnnnnnnnnnnnnnnnnnnnnnnnnnnnnnnnnnnnnnnnnnnnnnnnnnnnnnnnnnnnnnnnnnnnnnnnnnnnnnnnnnnnnnnnnnnnnnnnnnnnnnnnnnnnnnnnnnnnnnnnnnnnnnnnnnnnnnnnnnnnnnnnnnnnnnnnnnnnnnnnnnnnnnnnnnnnnnnnnnnnnnnnnnnnnnnnnnnnnnnnnnnnnnnnnnnnnnnnnnnnnnnnnnnnnnnnnnnnnnnnnnnnnnnnnnnnnnnnnnnnnnnnnnnnnnnnnnnnnnnnnnnnnnnnnnnnnnnnnnnnnnnnnnnnnnnnnnnnnnnnnnnnnnnnnnnnnnnnnnnnnnnnnnnnnnnnnnnnnnnnnnnnnnnnnnnnnnnnnnnnnnnnnnnnnnnnnnnnnnnnnnnnnnnnnnnnnnnnnnnnnnnnnnnnnnnnnnnnnnnnnnnnnnnnnnnnnnnnnnnnnnnnnnnnnnnnnnnnnnnnnnnnnnnnnnnnnnnnnnnnnnnnnnnnnnnnnnnnnnnnnnnnnnnnnnnnnnnnnnnnnnnnnnnnnnnnnnnnnnnnnnnnnnnnnnnnnnnnnnnnnnnnnnnnnnnnnnnnnnnnnnnnnnnnnnnnnnnnnnnnnnnnnnnnnnnnnnnnnnnnnnnnnnnnnnnnnnnnnnnnnnnnnnnnnnnnnnnnnnnnnnnnnnnnnnnnnnnnnnnnnnnnnnnnnnnnnnnnnnnnnnnnnnnnnnnnnnnnnnnnnnnnnnnnnnnnnnnnnnnnnnnnnnnnnnnnnnnnnnnnnnnnnnnnnnnnnnnnnnnnnnnnnnnnnnnnnnnnnnnnnnnnnnnnnnnnnnnnnnnnnnnnnnnnnnnnnnnnnnnnnnnnnnnnnnnnnnnnnnnnnnnnnnnnnnnnnnnnnnnnnnnnnnnnnnnnnnnnnnnnnnnnnnnnnnnnnnnnnnnnnnnnnnnnnnnnnnnnnnnnnnnnnnnnnnnnnnnnnnnnnnnnnnnnnnnnnnnnnnnnnnnnnnnnnnnnnnnnnnnnnnnnnnnnnnnnnnnnnnnnnnnnnnnnnnnnnnnnnnnnnnnnnnnnnnnnnnnnnnnnnnnnnnnnnnnnnnnnnnnnnnnnnnnnnnnnnnnnnnnnnnnnnnnnnnnnnnnnnnnnnnnnnnnnnnnnnnnnnnnnnnnnnnnnnnnnnnnnnnnnnnnnnnnnnnnnnnnnnnnnnnnnnnnnnnnnnnnnnnnnnnnnnnnnnnnnnnnnnnnnnnnnnnnnnnnnnnnnnnnnnnnnnnnnnnnnnnnnnnnnnnnnnnnnnnnnnnnnnnnnnnnnnnnnnnnnnnnnnnnnnnnnnnnnnnnnnnnnnnnnnnnnnnnnnnnnnnnnnnnnnnnnnnnnnnnnnnnnnnnnnnnnnnnnnnnnnnnnnnnnnnnnnnnnnnnnnnnnnnnnnnnnnnnnnnnnnnnnnnnnnnnnnnnnnnnnnnnnnnnnnnnnnnnnnnnnnnnnnnnnnnnnnnnnnnnnnnnnnnnnnnnnnnnnnnnnnnnnnnnnnnnnnnnnnnnnnnnnnnnnnnnnnnnnnnnnnnnnnnnnnnnnnnnnnnnnnnnnnnnnnnnnnnnnnnnnnnnnnnnnnnnnnnnnnnnnnnnnnnnnnnnnnnnnnnnnnnnnnnnnnnnnnnnnnnnnnnnnnnnnnnnnnnnnnnnnnnnnnnnnnnnnnnnnnnnnnnnnnnnnnnnnnnnnnnnnnnnnnnnnnnnnnnnnnnnnnnnnnnnnnnnnnnnnnnnnnnnnnnnnnnnnnnnnnnnnnnnnnnnnnnnnnnnnnnnnnnnnnnnnnnnnnnnnnnnnnnnnnnnnnnnnnnnnnnnnnnnnnnnnnnnnnnnnnnnnnnnnnnnnnnnnnnnnnnnnnnnnnnnnnnnnnnnnnnnnnnnnnnnnnnnnnnnnnnnnnnnnnnnnnnnnnnnnnnnnnnnnnnnnnnnnnnnnnnnnnnnnnnnnnnnnnnnnnnnnnnnnnnnnnnnnnnnnnnnnnnnnnnnnnnnnnnnnnnnnnnnnnnnnnnnnnnnnnnnnnnnnnnnnnnnnnnnnnnnnnnnnnnnnnnnnnnnnnnnnnnnnnnnnnnnnnnnnnnnnnnnnnnnnnnnnnnnnnnnnnnnnnnnnnnnnnnnnnnnnnnnnnnnnnnnnnnnnnnnnnnnnnnnnnnnnnnnnnnnnnnnnnnnnnnnnnnnnnnnnnnnnnnnnnnnnnnnnnnnnnnnnnnnnnnnnnnnnnnnnnnnnnnnnnnnnnnnnnnnnnnnnnnnnnnnnnnnnnnnnnnnnnnnnnnnnnnnnnnnnnnnnnnnnnnnnnnnnnnnnnnnnnnnnnnnnnnnnnnnnnnnnnnnnnnnnnnnnnnnnnnnnnnnnnnnnnnnnnnnnnnnnnnnnnnnnnnnnnnnnnnnnnnnnnnnnnnnnnnnnnnnnnnnnnnnnnnnnnnnnnnnnnnnnnnnnnnnnnnnnnnnnnnnnnnnnnnnnnnnnnnnnnnnnnnnnnnnnnnnnnnnnnnnnnnnnnnnnnnnnnnnnnnnnnnnnnnnnnnnnnnnnnnnnnnnnnnnnnnnnnnnnnnnnnnnnnnnnnnnnnnnnnnnnnnnnnnnnnnnnnnnnnnnnnnnnnnnnnnnnnnnnnnnnnnnnnnnnnnnnnnnnnnnnnnnnnnnnnnnnnnnnnnnnnnnnnnnnnnnnnnnnnnnnnnnnnnnnnnnnnnnnnnnnnnnnnnnnnnnnnnnnnnnnnnnnnnnnnnnnnnnnnnnnnnnnnnnnnnnnnnnnnnnnnnnnnnnnnnnnnnnnnnnnnnnnnnnnnnnnnnnnnnnnnnnnnnnnnnnnnnnnnnnnnnnnnnnnnnnnnnnnnnnnnnnnnnnnnnnnnnnnnnnnnnnnnnnnnnnnnnnnnnnnnnnnnnnnnnnnnnnnnnnnnnnnnnnnnnnnnnnnnnnnnnnnnnnnnnnnnnnnnnnnnnnnnnnnnnnnnnnnnnnnnnnnnnnnnnnnnnnnnnnnnnnnnnnnnnnnnnnnnnnnnnnnnnnnnnnnnnnnnnnnnnnnnnnnnnnnnnnnnnnnnnnnnnnnnnnnnnnnnnnnnnnnnnnnnnnnnnnnnnnnnnnnnnnnnnnnnnnnnnnnnnnnnnnnnnnnnnnnnnnnnnnnnnnnnnnnnnnnnnnnnnnnnnnnnnnnnnnnnnnnnnnnnnnnnnnnnnnnnnnnnnnnnnnnnnnnnnnnnnnnnnnnnnnnnnnnnnnnnnnnnnnnnnnnnnnnnnnnnnnnnnnnnnnnnnnnnnnnnnnnnnnnnnnnnnnnnnnnnnnnnnnnnnnnnnnnnnnnnnnnnnnnnnnnnnnnnnnnnnnnnnnnnnnnnnnnnnnnnnnnnnnnnnnnnnnnnnnnnnnnnnnnnnnnnnnnnnnnnnnnnnnnnnnnnnnnnnnnnnnnnnnnnnnnnnnnnnnnnnnnnnnnnnnnnnnnnnnnnnnnnnnnnnnnnnnnnnnnnnnnnnnnnnnnnnnnnnnnnnnnnnnnnnnnnnnnnnnnnnnnnnnnnnnnnnnnnnnnnnnnnnnnnnnnnnnnnnnnnnnnnnnnnnnnnnnnnnnnnnnnnnnnnnnnnnnnnnnnnnnnnnnnnnnnnnnnnnnnnnnnnnnnnnnnnnnnnnnnnnnnnnnnnnnnnnnnnnnnnnnnnnnnnnnnnnnnnnnnnnnnnnnnnnnnnnnnnnnnnnnnnnnnnnnnnnnnnnnnnnnnnnnnnnnnnnnnnnnnnnnnnnnnnnnnnnnnnnnnnnnnnnnnnnnnnnnnnnnnnnnnnnnnnnnnnnnnnnnnnnnnnnnnnnnnnnnnnnnnnnnnnnnnnnnnnnnnnnnnnnnnnnnnnnnnnnnnnnnnnnnnnnnnnnnnnnnnnnnnnnnnnnnnnnnnnnnnnnnnnnnnnnnnnnnnnnnnnnnnnnnnnnnnnnnnnnnnnnnnnnnnnnnnnnnnnnnnnnnnnnnnnnnnnnnnnnnnnnnnnnnnnnnnnnnnnnnnnnnnnnnnnnnnnnnnnnnnnnnnnnnnnnnnnnnnnnnnnnnnnnnnnnnnnnnnnnnnnnnnnnnnnnnnnnnnnnnnnnnnnnnnnnnnnnnnnnnnnnnnnnnnnnnnnnnnnnnnnnnnnnnnnnnnnnnnnnnnnnnnnnnnnnnnnnnnnnnnnnnnnnnnnnnnnnnnnnnnnnnnnnnnnnnnnnnnnnnnnnnnnnnnnnnnnnnnnnnnnnnnnnnnnnnnnnnnnnnnnnnnnnnnnnnnnnnnnnnnnnnnnnnnnnnnnnnnnnnnnnnnnnnnnnnnnnnnnnnnnnnnnnnnnnnnnnnnnnnnnnnnnnnnnnnnnnnnnnnnnnnnnnnnnnnnnnnnnnnnnnnnnnnnnnnnnnnnnnnnnnnnnnnnnnnnnnnnnnnnnnnnnnnnnnnnnnnnnnnnnnnnnnnnnnnnnnnnnnnnnnnnnnnnnnnnnnnnnnnnnnnnnnnnnnnnnnnnnnnnnnnnnnnnnnnnnnnnnnnnnnnnnnnnnnnnnnnnnnnnnnnnnnnnnnnnnnnnnnnnnnnnnnnnnnnnnnnnnnnnnnnnnnnnnnnnnnnnnnnnnnnnnnnnnnnnnnnnnnnnnnnnnnnnnnnnnnnnnnnnnnnnnnnnnnnnnnnnnnnnnnnnnnnnnnnnnnnnnnnnnnnnnnnnnnnnnnnnnnnnnnnnnnnnnnnnnnnnnnnnnnnnnnnnnnnnnnnnnnnnnnnnnnnnnnnnnnnnnnnnnnnnnnnnnnnnnnnnnnnnnnnnnnnnnnnnnnnnnnnnnnnnnnnnnnnnnnnnnnnnnnnnnnnnnnnnnnnnnnnnnnnnnnnnnnnnnnnnnnnnnnnnnnnnnnnnnnnnnnnnnnnnnnnnnnnnnnnnnnnnnnnnnnnnnnnnnnnnnnnnnnnnnnnnnnnnnnnnnnnnnnnnnnnnnnnnnnnnnnnnnnnnnnnnnnnnnnnnnnnnnnnnnnnnnnnnnnnnnnnnnnnnnnnnnnnnnnnnnnnnnnnnnnnnnnnnnnnnnnnnnnnnnnnnnnnnnnnnnnnnnnnnnnnnnnnnnnnnnnnnnnnnnnnnnnnnnnnnnnnnnnnnnnnnnnnnnnnnnnnnnnnnnnnnnnnnnnnnnnnnnnnnnnnnnnnnnnnnnnnnnnnnnnnnnnnnnnnnnnnnnnnnnnnnnnnnnnnnnnnnnnnnnnnnnnnnnnnnnnnnnnnnnnnnnnnnnnnnnnnnnnnnnnnnnnnnnnnnnnnnnnnnnnnnnnnnnnnnnnnnnnnnnnnnnnnnnnnnnnnnnnnnnnnnnnnnnnnnnnnnnnnnnnnnnnnnnnnnnnnnnnnnnnnnnnnnnnnnnnnnnnnnnnnnnnnnnnnnnnnnnnnnnnnnnnnnnnnnnnnnnnnnnnnnnnnnnnnnnnnnnnnnnnnnnnnnnnnnnnnnnnnnnnnnnnnnnnnnnnnnnnnnnnnnnnnnnnnnnnnnnnnnnnnnnnnnnnnnnnnnnnnnnnnnnnnnnnnnnnnnnnnnnnnnnnnnnnnnnnnnnnnnnnnnnnnnnnnnnnnnnnnnnnnnnnnnnnnnnnnnnnnnnnnnnnnnnnnnnnnnnnnnnnnnnnnnnnnnnnnnnnnnnnnnnnnnnnnnnnnnnnnnnnnnnnnnnnnnnnnnnnnnnnnnnnnnnnnnnnnnnnnnnnnnnnnnnnnnnnnnnnnnnnnnnnnnnnnnnnnnnnnnnnnnnnnnnnnnnnnnnnnnnnnnnnnnnnnnnnnnnnnnnnnnnnnnnnnnnnnnnnnnnnnnnnnnnnnnnnnnnnnnnnnnnnnnnnnnnnnnnnnnnnnnnnnnnnnnnnnnnnnnnnnnnnnnnnnnnnnnnnnnnnnnnnnnnnnnnnnnnnnnnnnnnnnnnnnnnnnnnnnnnnnnnnnnnnnnnnnnnnnnnnnnnnnnnnnnnnnnnnnnnnnnnnnnnnnnnnnnnnnnnnnnnnnnnnnnnnnnnnnnnnnnnnnnnnnnnnnnnnnnnnnnnnnnnnnnnnnnnnnnnnnnnnnnnnnnnnnnnnnnnnnnnnnnnnnnnnnnnnnnnnnnnnnnnnnnnnnnnnnnnnnnnnnnnnnnnnnnnnnnnnnnnnnnnnnnnnnnnnnnnnnnnnnnnnnnnnnnnnnnnnnnnnnnnnnnnnnnnnnnnnnnnnnnnnnnnnnnnnnnnnnnnnnnnnnnnnnnnnnnnnnnnnnnnnnnnnnnnnnnnnnnnnnnnnnnnnnnnnnnnnnnnnnnnnnnnnnnnnnnnnnnnnnnnnnnnnnnnnnnnnnnnnnnnnnnnnnnnnnnnnnnnnnnnnnnnnnnnnnnnnnnnnnnnnnnnnnnnnnnnnnnnnnnnnnnnnnnnnnnnnnnnnnnnnnnnnnnnnnnnnnnnnnnnnnnnnnnnnnnnnnnnnnnnnnnnnnnnnnnnnnnnnnnnnnnnnnnnnnnnnnnnnnnnnnnnnnnnnnnnnnnnnnnnnnnnnnnnnnnnnnnnnnnnnnnnnnnnnnnnnnnnnnnnnnnnnnnnnnnnnnnnnnnnnnnnnnnnnnnnnnnnnnnnnnnnnnnnnnnnnnnnnnnnnnnnnnnnnnnnnnnnnnnnnnnnnnnnnnnnnnnnnnnnnnnnnnnnnnnnnnnnnnnnnnnnnnnnnnnnnnnnnnnnnnnnnnnnnnnnnnnnnnnnnnnnnnnnnnnnnnnnnnnnnnnnnnnnnnnnnnnnnnnnnnnnnnnnnnnnnnnnnnnnnnnnnnnnnnnnnnnnnnnnnnnnnnnnnnnnnnnnnnnnnnnnnnnnnnnnnnnnnnnnnnnnnnnnnnnnnnnnnnnnnnnnnnnnnnnnnnnnnnnnnnnnnnnnnnnnnnnnnnnnnnnnnnnnnnnnnnnnnnnnnnnnnnnnnnnnnnnnnnnnnnnnnnnnnnnnnnnnnnnnnnnnnnnnnnnnnnnnnnnnnnnnnnnnnnnnnnnnnnnnnnnnnnnnnnnnnnnnnnnnnnnnnnnnnnnnnnnnnnnnnnnnnnnnnnnnnnnnnnnnnnnnnnnnnnnnnnnnnnnnnnnnnnnnnnnnnnnnnnnnnnnnnnnnnnnnnnnnnnnnnnnnnnnnnnnnnnnnnnnnnnnnnnnnnnnnnnnnnnnnnnnnnnnnnnnnnnnnnnnnnnnnnnnnnnnnnnnnnnnnnnnnnnnnnnnnnnnnnnnnnnnnnnnnnnnnnnnnnnnnnnnnnnnnnnnnnnnnnnnnnnnnnnnnnnnnnnnnnnnnnnnnnnnnnnnnnnnnnnnnnnnnnnnnnnnnnnnnnnnnnnnnnnnnnnnnnnnnnnnnnnnnnnnnnnnnnnnnnnnnnnnnnnnnnnnnnnnnnnnnnnnnnnnnnnnnnnnnnnnnnnnnnnnnnnnnnnnnnnnnnnnnnnnnnnnnnnnnnnnnnnnnnnnnnnnnnnnnnnnnnnnnnnnnnnnnnnnnnnnnnnnnnnnnnnnnnnnnnnnnnnnnnnnnnnnnnnnnnnnnnnnnnnnnnnnnnnnnnnnnnnnnnnnnnnnnnnnnnnnnnnnnnnnnnnnnnnnnnnnnnnnnnnnnnnnnnnnnnnnnnnnnnnnnnnnnnnnnnnnnnnnnnnnnnnnnnnnnnnnnnnnnnnnnnnnnnnnnnnnnnnnnnnnnnnnnnnnnnnnnnnnnnnnnnnnnnnnnnnnnnnnnnnnnnnnnnnnnnnnnnnnnnnnnnnnnnnnnnnnnnnnnnnnnnnnnnnnnnnnnnnnnnnnnnnnnnnnnnnnnnnnnnnnnnnnnnnnnnnnnnnnnnnnnnnnnnnnnnnnnnnnnnnnnnnnnnnnnnnnnnnnnnnnnnnnnnnnnnnnnnnnnnnnnnnnnnnnnnnnnnnnnnnnnnnnnnnnnnnnnnnnnnnnnnnnnnnnnnnnnnnnnnnnnnnnnnnnnnnnnnnnnnnnnnnnnnnnnnnnnnnnnnnnnnnnnnnnnnnnnnnnnnnnnnnnnnnnnnnnnnnnnnnnnnnnnnnnnnnnnnnnnnnnnnnnnnnnnnnnnnnnnnnnnnnnnnnnnnnnnnnnnnnnnnnnnnnnnnnnnnnnnnnnnnnnnnnnnnnnnnnnnnnnnnnnnnnnnnnnnnnnnnnnnnnnnnnnnnnnnnnnnnnnnnnnnnnnnnnnnnnnnnnnnnnnnnnnnnnnnnnnnnnnnnnnnnnnnnnnnnnnnnnnnnnnnnnnnnnnnnnnnnnnnnnnnnnnnnnnnnnnnnnnnnnnnnnnnnnnnnnnnnnnnnnnnnnnnnnnnnnnnnnnnnnnnnnnnnnnnnnnnnnnnnnnnnnnnnnnnnnnnnnnnnnnnnnnnnnnnnnnnnnnnnnnnnnnnnnnnnnnnnnnnnnnnnnnnnnnnnnnnnnnnnnnnnnnnnnnnnnnnnnnnnnnnnnnnnnnnnnnnnnnnnnnnnnnnnnnnnnnnnnnnnnnnnnnnnnnnnnnnnnnnnnnnnnnnnnnnnnnnnnnnnnnnnnnnnnnnnnnnnnnnnnnnnnnnnnnnnnnnnnnnnnnnnnnnnnnnnnnnnnnnnnnnnnnnnnnnnnnnnnnnnnnnnnnnnnnnnnnnnnnnnnnnnnnnnnnnnnnnnnnnnnnnnnnnnnnnnnnnnnnnnnnnnnnnnnnnnnnnnnnnnnnnnnnnnnnnnnnnnnnnnnnnnnnnnnnnnnnnnnnnnnnnnnnnnnnnnnnnnnnnnnnnnnnnnnnnnnnnnnnnnnnnnnnnnnnnnnnnnnnnnnnnnnnnnnnnnnnnnnnnnnnnnnnnnnnnnnnnnnnnnnnnnnnnnnnnnnnnnnnnnnnnnnnnnnnnnnnnnnnnnnnnnnnnnnnnnnnnnnnnnnnnnnnnnnnnnnnnnnnnnnnnnnnnnnnnnnnnnnnnnnnnnnnnnnnnnnnnnnnnnnnnnnnnnnnnnnnnnnnnnnnnnnnnnnnnnnnnnnnnnnnnnnnnnnnnnnnnnnnnnnnnnnnnnnnnnnnnnnnnnnnnnnnnnnnnnnnnnnnnnnnnnnnnnnnnnnnnnnnnnnnnnnnnnnnnnnnnnnnnnnnnnnnnnnnnnnnnnnnnnnnnnnnnnnnnnnnnnnnnnnnnnnnnnnnnnnnnnnnnnnnnnnnnnnnnnnnnnnnnnnnnnnnnnnnnnnnnnnnnnnnnnnnnnnnnnnnnnnnnnnnnnnnnnnnnnnnnnnnnnnnnnnnnnnnnnnnnnnnnnnnnnnnnnnnnnnnnnnnnnnnnnnnnnnnnnnnnnnnnnnnnnnnnnnnnnnnnnnnnnnnnnnnnnnnnnnnnnnnnnnnnnnnnnnnnnnnnnnnnnnnnnnnnnnnnnnnnnnnnnnnnnnnnnnnnnnnnnnnnnnnnnnnnnnnnnnnnnnnnnnnnnnnnnnnnnnnnnnnnnnnnnnnnnnnnnnnnnnnnnnnnnnnnnnnnnnnnnnnnnnnnnnnnnnnnnnnnnnnnnnnnnnnnnnnnnnnnnnnnnnnnnnnnnnnnnnnnnnnnnnnnnnnnnnnnnnnnnnnnnnnnnnnnnnnnnnnnnnnnnnnnnnnnnnnnnnnnnnnnnnnnnnnnnnnnnnnnnnnnnnnnnnnnnnnnnnnnnnnnnnnnnnnnnnnnnnnnnnnnnnnnnnnnnnnnnnnnnnnnnnnnnnnnnnnnnnnnnnnnnnnnnnnnnnnnnnnnnnnnnnnnnnnnnnnnnnnnnnnnnnnnnnnnnnnnnnnnnnnnnnnnnnnnnnnnnnnnnnnnnnnnnnnnnnnnnnnnnnnnnnnnnnnnnnnnnnnnnnnnnnnnnnnnnnnnnnnnnnnnnnnnnnnnnnnnnnnnnnnnnnnnnnnnnnnnnnnnnnnnnnnnnnnnnnnnnnnnnnnnnnnnnnnnnnnnnnnnnnnnnnnnnnnnnnnnnnnnnnnnnnnnnnnnnnnnnnnnnnnnnnnnnnnnnnnnnnnnnnnnnnnnnnnnnnnnnnnnnnnnnnnnnnnnnnnnnnnnnnnnnnnnnnnnnnnnnnnnnnnnnnnnnnnnnnnnnnnnnnnnnnnnnnnnnnnnnnnnnnnnnnnnnnnnnnnnnnnnnnnnnnnnnnnnnnnnnnnnnnnnnnnnnnnnnnnnnnnnnnnnnnnnnnnnnnnnnnnnnnnnnnnnnnnnnnnnnnnnnnnnnnnnnnnnnnnnnnnnnnnnnnnnnnnnnnnnnnnnnnnnnnnnnnnnnnnnnnnnnnnnnnnnnnnnnnnnnnnnnnnnnnnnnnnnnnnnnnnnnnnnnnnnnnnnnnnnnnnnnnnnnnnnnnnnnnnnnnnnnnnnnnnnnnnnnnnnnnnnnnnnnnnnnnnnnnnnnnnnnnnnnnnnnnnnnnnnnnnnnnnnnnnnnnnnnnnnnnnnnnnnnnnnnnnnnnnnnnnnnnnnnnnnnnnnnnnnnnnnnnnnnnnnnnnnnnnnnnnnnnnnnnnnnnnnnnnnnnnnnnnnnnnnnnnnnnnnnnnnnnnnnnnnnnnnnnnnnnnnnnnnnnnnnnnnnnnnnnnnnnnnnnnnnnnnnnnnnnnnnnnnnnnnnnnnnnnnnnnnnnnnnnnnnnnnnnnnnnnnnnnnnnnnnnnnnnnnnnnnnnnnnnnnnnnnnnnnnnnnnnnnnnnnnnnnnnnnnnnnnnnnnnnnnnnnnnnnnnnnnnnnnnnnnnnnnnnnnnnnnnnnnnnnnnnnnnnnnnnnnnnnnnnnnnnnnnnnnnnnnnnnnnnnnnnnnnnnnnnnnnnnnnnnnnnnnnnnnnnnnnnnnnnnnnnnnnnnnnnnnnnnnnnnnnnnnnnnnnnnnnnnnnnnnnnnnnnnnnnnnnnnnnnnnnnnnnnnnnnnnnnnnnnnnnnnnnnnnnnnnnnnnnnnnnnnnnnnnnnnnnnnnnnnnnnnnnnnnnnnnnnnnnnnnnnnnnnnnnnnnnnnnnnnnnnnnnnnnnnnnnnnnnnnnnnnnnnnnnnnnnnnnnnnnnnnnnnnnnnnnnnnnnnnnnnnnnnnnnnnnnnnnnnnnnnnnnnnnnnnnnnnnnnnnnnnnnnnnnnnnnnnnnnnnnnnnnnnnnnnnnnnnnnnnnnnnnnnnnnnnnnnnnnnnnnnnnnnnnnnnnnnnnnnnnnnnnnnnnnnnnnnnnnnnnnnnnnnnnnnnnnnnnnnnnnnnnnnnnnnnnnnnnnnnnnnnnnnnnnnnnnnnnnnnnnnnnnnnnnnnnnnnnnnnnnnnnnnnnnnnnnnnnnnnnnnnnnnnnnnnnnnnnnnnnnnnnnnnnnnnnnnnnnnnnnnnnnnnnnnnnnnnnnnnnnnnnnnnnnnnnnnnnnnnnnnnnnnnnnnnnnnnnnnnnnnnnnnnnnnnnnnnnnnnnnnnnnnnnnnnnnnnnnnnnnnnnnnnnnnnnnnnnnnnnnnnnnnnnnnnnnnnnnnnnnnnnnnnnnnnnnnnnnnnnnnnnnnnnnnnnnnnnnnnnnnnnnnnnnnnnnnnnnnnnnnnnnnnnnnnnnnnnnnnnnnnnnnnnnnnnnnnnnnnnnnnnnnnnnnnnnnnnnnnnnnnnnnnnnnnnnnnnnnnnnnnnnnnnnnnnnnnnnnnnnnnnnnnnnnnnnnnnnnnnnnnnnnnnnnnnnnnnnnnnnnnnnnnnnnnnnnnnnnnnnnnnnnnnnnnnnnnnnnnnnnnnnnnnnnnnnnnnnnnnnnnnnnnnnnnnnnnnnnnnnnnnnnnnnnnnnnnnnnnnnnnnnnnnnnnnnnnnnnnnnnnnnnnnnnnnnnnnnnnnnnnnnnnnnnnnnnnnnnnnnnnnnnnnnnnnnnnnnnnnnnnnnnnnnnnnnnnnnnnnnnnnnnnnnnnnnnnnnnnnnnnnnnnnnnnnnnnnnnnnnnnnnnnnnnnnnnnnnnnnnnnnnnnnnnnnnnnnnnnnnnnnnnnnnnnnnnnnnnnnnnnnnnnnnnnnnnnnnnnnnnnnnnnnnnnnnnnnnnnnnnnnnnnnnnnnnnnnnnnnnnnnnnnnnnnnnnnnnnnnnnnnnnnnnnnnnnnnnnnnnnnnnnnnnnnnnnnnnnnnnnnnnnnnnnnnnnnnnnnnnnnnnnnnnnnnnnnnnnnnnnnnnnnnnnnnnnnnnnnnnnnnnnnnnnnnnnnnnnnnnnnnnnnnnnnnnnnnnnnnnnnnnnnnnnnnnnnnnnnnnnnnnnnnnnnnnnnnnnnnnnnnnnnnnnnnnnnnnnnnnnnnnnnnnnnnnnnnnnnnnnnnnnnnnnnnnnnnnnnnnnnnnnnnnnnnnnnnnnnnnnnnnnnnnnnnnnnnnnnnnnnnnnnnnnnnnnnnnnnnnnnnnnnnnnnnnnnnnnnnnnnnnnnnnnnnnnnnnnnnnnnnnnnnnnnnnnnnnnnnnnnnnnnnnnnnnnnnnnnnnnnnnnnnnnnnnnnnnnnnnnnnnnnnnnnnnnnnnnnnnnnnnnnnnnnnnnnnnnnnnnnnnnnnnnnnnnnnnnnnnnnnnnnnnnnnnnnnnnnnnnnnnnnnnnnnnnnnnnnnnnnnnnnnnnnnnnnnnnnnnnnnnnnnnnnnnnnnnnnnnnnnnnnnnnnnnnnnnnnnnnnnnnnnnnnnnnnnnnnnnnnnnnnnnnnnnnnnnnnnnnnnnnnnnnnnnnnnnnnnnnnnnnnnnnnnnnnnnnnnnnnnnnnnnnnnnnnnnnnnnnnnnnnnnnnnnnnnnnnnnnnnnnnnnnnnnnnnnnnnnnnnnnnnnnnnnnnnnnnnnnnnnnnnnnnnnnnnnnnnnnnnnnnnnnnnnnnnnnnnnnnnnnnnnnnnnnnnnnnnnnnnnnnnnnnnnnnnnnnnnnnnnnnnnnnnnnnnnnnnnnnnnnnnnnnnnnnnnnnnnnnnnnnnnnnnnnnnnnnnnnnnnnnnnnnnnnnnnnnnnnnnnnnnnnnnnnnnnnnnnnnnnnnnnnnnnnnnnnnnnnnnnnnnnnnnnnnnnnnnnnnnnnnnnnnnnnnnnnnnnnnnnnnnnnnnnnnnnnnnnnnnnnnnnnnnnnnnnnnnnnnnnnnnnnnnnnnnnnnnnnnnnnnnnnnnnnnnnnnnnnnnnnnnnnnnnnnnnnnnnnnnnnnnnnnnnnnnnnnnnnnnnnnnnnnnnnnnnnnnnnnnnnnnnnnnnnnnnnnnnnnnnnnnnnnnnnnnnnnnnnnnnnnnnnnnnnnnnnnnnnnnnnnnnnnnnnnnnnnnnnnnnnnnnnnnnnnnnnnnnnnnnnnnnnnnnnnnnnnnnnnnnnnnnnnnnnnnnnnnnnnnnnnnnnnnnnnnnnnnnnnnnnnnnnnnnnnnnnnnnnnnnnnnnnnnnnnnnnnnnnnnnnnnnnnnnnnnnnnnnnnnnnnnnnnnnnnnnnnnnnnnnnnnnnnnnnnnnnnnnnnnnnnnnnnnnnnnnnnnnnnnnnnnnnnnnnnnnnnnnnnnnnnnnnnnnnnnnnnnnnnnnnnnnnnnnnnnnnnnnnnnnnnnnnnnnnnnnnnnnnnnnnnnnnnnnnnnnnnnnnnnnnnnnnnnnnnnnnnnnnnnnnnnnnnnnnnnnnnnnnnnnnnnnnnnnnnnnnnnnnnnnnnnnnnnnnnnnnnnnnnnnnnnnnnnnnnnnnnnnnnnnnnnnnnnnnnnnnnnnnnnnnnnnnnnnnnnnnnnnnnnnnnnnnnnnnnnnnnnnnnnnnnnnnnnnnnnnnnnnnnnnnnnnnnnnnnnnnnnnnnnnnnnnnnnnnnnnnnnnnnnnnnnnnnnnnnnnnnnnnnnnnnnnnnnnnnnnnnnnnnnnnnnnnnnnnnnnnnnnnnnnnnnnnnnnnnnnnnnnnnnnnnnnnnnnnnnnnnnnnnnnnnnnnnnnnnnnnnnnnnnnnnnnnnnnnnnnnnnnnnnnnnnnnnnnnnnnnnnnnnnnnnnnnnnnnnnnnnnnnnnnnnnnnnnnnnnnnnnnnnnnnnnnnnnnnnnnnnnnnnnnnnnnnnnnnnnnnnnnnnnnnnnnnnnnnnnnnnnnnnnnnnnnnnnnnnnnnnnnnnnnnnnnnnnnnnnnnnnnnnnnnnnnnnnnnnnnnnnnnnnnnnnnnnnnnnnnnnnnnnnnnnnnnnnnnnnnnnnnnnnnnnnnnnnnnnnnnnnnnnnnnnnnnnnnnnnnnnnnnnnnnnnnnnnnnnnnnnnnnnnnnnnnnnnnnnnnnnnnnnnnnnnnnnnnnnnnnnnnnnnnnnnnnnnnnnnnnnnnnnnnnnnnnnnnnnnnnnnnnnnnnnnnnnnnnnnnnnnnnnnnnnnnnnnnnnnnnnnnnnnnnnnnnnnnnnnnnnnnnnnnnnnnnnnnnnnnnnnnnnnnnnnnnnnnnnnnnnnnnnnnnnnnnnnnnnnnnnnnnnnnnnnnnnnnnnnnnnnnnnnnnnnnnnnnnnnnnnnnnnnnnnnnnnnnnnnnnnnnnnnnnnnnnnnnnnnnnnnnnnnnnnnnnnnnnnnnnnnnnnnnnnnnnnnnnnnnnnnnnnnnnnnnnnnnnnnnnnnnnnnnnnnnnnnnnnnnnnnnnnnnnnnnnnnnnnnnnnnnnnnnnnnnnnnnnnnnnnnnnnnnnnnnnnnnnnnnnnnnnnnnnnnnnnnnnnnnnnnnnnnnnnnnnnnnnnnnnnnnnnnnnnnnnnnnnnnnnnnnnnnnnnnnnnnnnnnnnnnnnnnnnnnnnnnnnnnnnnnnnnnnnnnnnnnnnnnnnnnnnnnnnnnnnnnnnnnnnnnnnnnnnnnnnnnnnnnnnnnnnnnnnnnnnnnnnnnnnnnnnnnnnnnnnnnnnnnnnnnnnnnnnnnnnnnnnnnnnnnnnnnnnnnnnnnnnnnnnnnnnnnnnnnnnnnnnnnnnnnnnnnnnnnnnnnnnnnnnnnnnnnnnnnnnnnnnnnnnnnnnnnnnnnnnnnnnnnnnnnnnnnnnnnnnnnnnnnnnnnnnnnnnnnnnnnnnnnnnnnnnnnnnnnnnnnnnnnnnnnnnnnnnnnnnnnnnnnnnnnnnnnnnnnnnnnnnnnnnnnnnnnnnnnnnnnnnnnnnnnnnnnnnnnnnnnnnnnnnnnnnnnnnnnnnnnnnnnnnnnnnnnnnnnnnnnnnnnnnnnnnnnnnnnnnnnnnnnnnnnnnnnnnnnnnnnnnnnnnnnnnnnnnnnnnnnnnnnnnnnnnnnnnnnnnnnnnnnnnnnnnnnnnnnnnnnnnnnnnnnnnnnnnnnnnnnnnnnnnnnnnnnnnnnnnnnnnnnnnnnnnnnnnnnnnnnnnnnnnnnnnnnnnnnnnnnnnnnnnnnnnnnnnnnnnnnnnnnnnnnnnnnnnnnnnnnnnnnnnnnnnnnnnnnnnnnnnnnnnnnnnnnnnnnnnnnnnnnnnnnnnnnnnnnnnnnnnnnnnnnnnnnnnnnnnnnnnnnnnnnnnnnnnnnnnnnnnnnnnnnnnnnnnnnnnnnnnnnnnnnnnnnnnnnnnnnnnnnnnnnnnnnnnnnnnnnnnnnnnnnnnnnnnnnnnnnnnnnnnnnnnnnnnnnnnnnnnnnnnnnnnnnnnnnnnnnnnnnnnnnnnnnnnnnnnnnnnnnnnnnnnnnnnnnnnnnnnnnnnnnnnnnnnnnnnnnnnnnnnnnnnnnnnnnnnnnnnnnnnnnnnnnnnnnnnnnnnnnnnnnnnnnnnnnnnnnnnnnnnnnnnnnnnnnnnnnnnnnnnnnnnnnnnnnnnnnnnnnnnnnnnnnnnnnnnnnnnnnnnnnnnnnnnnnnnnnnnnnnnnnnnnnnnnnnnnnnnnnnnnnnnnnnnnnnnnnnnnnnnnnnnnnnnnnnnnnnnnnnnnnnnnnnnnnnnnnnnnnnnnnnnnnnnnnnnnnnnnnnnnnnnnnnnnnnnnnnnnnnnnnnnnnnnnnnnnnnnnnnnnnnnnnnnnnnnnnnnnnnnnnnnnnnnnnnnnnnnnnnnnnnnnnnnnnnnnnnnnnnnnnnnnnnnnnnnnnnnnnnnnnnnnnnnnnnnnnnnnnnnnnnnnnnnnnnnnnnnnnnnnnnnnnnnnnnnnnnnnnnnnnnnnnnnnnnnnnnnnnnnnnnnnnnnnnnnnnnnnnnnnnnnnnnnnnnnnnnnnnnnnnnnnnnnnnnnnnnnnnnnnnnnnnnnnnnnnnnnnnnnnnnnnnnnnnnnnnnnnnnnnnnnnnnnnnnnnnnnnnnnnnnnnnnnnnnnnnnnnnnnnnnnnnnnnnnnnnnnnnnnnnnnnnnnnnnnnnnnnnnnnnnnnnnnnnnnnnnnnnnnnnnnnnnnnnnnnnnnnnnnnnnnnnnnnnnnnnnnnnnnnnnnnnnnnnnnnnnnnnnnnnnnnnnnnnnnnnnnnnnnnnnnnnnnnnnnnnnnnnnnnnnnnnnnnnnnnnnnnnnnnnnnnnnnnnnnnnnnnnnnnnnnnnnnnnnnnnnnnnnnnnnnnnnnnnnnnnnnnnnnnnnnnnnnnnnnnnnnnnnnnnnnnnnnnnnnnnnnnnnnnnnnnnnnnnnnnnnnnnnnnnnnnnnnnnnnnnnnnnnnnnnnnnnnnnnnnnnnnnnnnnnnnnnnnnnnnnnnnnnnnnnnnnnnnnnnnnnnnnnnnnnnnnnnnnnnnnnnnnnnnnnnnnnnnnnnnnnnnnnnnnnnnnnnnnnnnnnnnnnnnnnnnnnnnnnnnnnnnnnnnnnnnnnnnnnnnnnnnnnnnnnnnnnnnnnnnnnnnnnnnnnnnnnnnnnnnnnnnnnnnnnnnnnnnnnnnnnnnnnnnnnnnnnnnnnnnnnnnnnnnnnnnnnnnnnnnnnnnnnnnnnnnnnnnnnnnnnnnnnnnnnnnnnnnnnnnnnnnnnnnnnnnnnnnnnnnnnnnnnnnnnnnnnnnnnnnnnnnnnnnnnnnnnnnnnnnnnnnnnnnnnnnnnnnnnnnnnnnnnnnnnnnnnnnnnnnnnnnnnnnnnnnnnnnnnnnnnnnnnnnnnnnnnnnnnnnnnnnnnnnnnnnnnnnnnnnnnnnnnnnnnnnnnnnnnnnnnnnnnnnnnnnnnnnnnnnnnnnnnnnnnnnnnnnnnnnnnnnnnnnnnnnnnnnnnnnnnnnnnnnnnnnnnnnnnnnnnnnnnnnnnnnnnnnnnnnnnnnnnnnnnnnnnnnnnnnnnnnnnnnnnnnnnnnnnnnnnnnnnnnnnnnnnnnnnnnnnnnnnnnnnnnnnnnnnnnnnnnnnnnnnnnnnnnnnnnnnnnnnnnnnnnnnnnnnnnnnnnnnnnnnnnnnnnnnnnnnnnnnnnnnnnnnnnnnnnnnnnnnnnnnnnnnnnnnnnnnnnnnnnnnnnnnnnnnnnnnnnnnnnnnnnnnnnnnnnnnnnnnnnnnnnnnnnnnnnnnnnnnnnnnnnnnnnnnnnnnnnnnnnnnnnnnnnnnnnnnnnnnnnnnnnnnnnnnnnnnnnnnnnnnnnnnnnnnnnnnnnnnnnnnnnnnnnnnnnnnnnnnnnnnnnnnnnnnnnnnnnnnnnnnnnnnnnnnnnnnnnnnnnnnnnnnnnnnnnnnnnnnnnnnnnnnnnnnnnnnnnnnnnnnnnnnnnnnnnnnnnnnnnnnnnnnnnnnnnnnnnnnnnnnnnnnnnnnnnnnnnnnnnnnnnnnnnnnnnnnnnnnnnnnnnnnnnnnnnnnnnnnnnnnnnnnnnnnnnnnnnnnnnnnnnnnnnnnnnnnnnnnnnnnnnnnnnnnnnnnnnnnnnnnnnnnnnnnnnnnnnnnnnnnnnnnnnnnnnnnnnnnnnnnnnnnnnnnnnnnnnnnnnnnnnnnnnnnnnnnnnnnnnnnnnnnnnnnnnnnnnnnnnnnnnnnnnnnnnnnnnnnnnnnnnnnnnnnnnnnnnnnnnnnnnnnnnnnnnnnnnnnnnnnnnnnnnnnnnnnnnnnnnnnnnnnnnnnnnnnnnnnnnnnnnnnnnnnnnnnnnnnnnnnnnnnnnnnnnnnnnnnnnnnnnnnnnnnnnnnnnnnnnnnnnnnnnnnnnnnnnnnnnnnnnnnnnnnnnnnnnnnnnnnnnnnnnnnnnnnnnnnnnnnnnnnnnnnnnnnnnnnnnnnnnnnnnnnnnnnnnnnnnnnnnnnnnnnnnnnnnnnnnnnnnnnnnnnnnnnnnnnnnnnnnnnnnnnnnnnnnnnnnnnnnnnnnnnnnnnnnnnnnnnnnnnnnnnnnnnnnnnnnnnnnnnnnnnnnnnnnnnnnnnnnnnnnnnnnnnnnnnnnnnnnnnnnnnnnnnnnnnnnnnnnnnnnnnnnnnnnnnnnnnnnnnnnnnnnnnnnnnnnnnnnnnnnnnnnnnnnnnnnnnnnnnnnnnnnnnnnnnnnnnnnnnnnnnnnnnnnnnnnnnnnnnnnnnnnnnnnnnnnnnnnnnnnnnnnnnnnnnnnnnnnnnnnnnnnnnnnnnnnnnnnnnnnnnnnnnnnnnnnnnnnnnnnnnnnnnnnnnnnnnnnnnnnnnnnnnnnnnnnnnnnnnnnnnnnnnnnnnnnnnnnnnnnnnnnnnnnnnnnnnnnnnnnnnnnnnnnnnnnnnnnnnnnnnnnnnnnnnnnnnnnnnnnnnnnnnnnnnnnnnnnnnnnnnnnnnnnnnnnnnnnnnnnnnnnnnnnnnnnnnnnnnnnnnnnnnnnnnnnnnnnnnnnnnnnnnnnnnnnnnnnnnnnnnnnnnnnnnnnnnnnnnnnnnnnnnnnnnnnnnnnnnnnnnnnnnnnnnnnnnnnnnnnnnnnnnnnnnnnnnnnnnnnnnnnnnnnnnnnnnnnnnnnnnnnnnnnnnnnnnnnnnnnnnnnnnnnnnnnnnnnnnnnnnnnnnnnnnnnnnnnnnnnnnnnnnnnnnnnnnnnnnnnnnnnnnnnnnnnnnnnnnnnnnnnnnnnnnnnnnnnnnnnnnnnnnnnnnnnnnnnnnnnnnnnnnnnnnnnnnnnnnnnnnnnnnnnnnnnnnnnnnnnnnnnnnnnnnnnnnnnnnnnnnnnnnnnnnnnnnnnnnnnnnnnnnnnnnnnnnnnnnnnnnnnnnnnnnnnnnnnnnnnnnnnnnnnnnnnnnnnnnnnnnnnnnnnnnnnnnnnnnnnnnnnnnnnnnnnnnnnnnnnnnnnnnnnnnnnnnnnnnnnnnnnnnnnnnnnnnnnnnnnnnnnnnnnnnnnnnnnnnnnnnnnnnnnnnnnnnnnnnnnnnnnnnnnnnnnnnnnnnnnnnnnnnnnnnnnnnnnnnnnnnnnnnnnnnnnnnnnnnnnnnnnnnnnnnnnnnnnnnnnnnnnnnnnnnnnnnnnnnnnnnnnnnnnnnnnnnnnnnnnnnnnnnnnnnnnnnnnnnnnnnnnnnnnnnnnnnnnnnnnnnnnnnnnnnnnnnnnnnnnnnnnnnnnnnnnnnnnnnnnnnnnnnnnnnnnnnnnnnnnnnnnnnnnnnnnnnnnnnnnnnnnnnnnnnnnnnnnnnnnnnnnnnnnnnnnnnnnnnnnnnnnnnnnnnnnnnnnnnnnnnnnnnnnnnnnnnnnnnnnnnnnnnnnnnnnnnnnnnnnnnnnnnnnnnnnnnnnnnnnnnnnnnnnnnnnnnnnnnnnnnnnnnnnnnnnnnnnnnnnnnnnnnnnnnnnnnnnnnnnnnnnnnnnnnnnnnnnnnnnnnnnnnnnnnnnnnnnnnnnnnnnnnnnnnnnnnnnnnnnnnnnnnnnnnnnnnnnnnnnnnnnnnnnnnnnnnnnnnnnnnnnnnnnnnnnnnnnnnnnnnnnnnnnnnnnnnnnnnnnnnnnnnnnnnnnnnnnnnnnnnnnnnnnnnnnnnnnnnnnnnnnnnnnnnnnnnnnnnnnnnnnnnnnnnnnnnnnnnnnnnnnnnnnnnnnnnnnnnnnnnnnnnnnnnnnnnnnnnnnnnnnnnnnnnnnnnnnnnnnnnnnnnnnnnnnnnnnnnnnnnnnnnnnnnnnnnnnnnnnnnnnnnnnnnnnnnnnnnnnnnnnnnnnnnnnnnnnnnnnnnnnnnnnnnnnnnnnnnnnnnnnnnnnnnnnnnnnnnnnnnnnnnnnnnnnnnnnnnnnnnnnnnnnnnnnnnnnnnnnnnnnnnnnnnnnnnnnnnnnnnnnnnnnnnnnnnnnnnnnnnnnnnnnnnnnnnnnnnnnnnnnnnnnnnnnnnnnnnnnnnnnnnnnnnnnnnnnnnnnnnnnnnnnnnnnnnnnnnnnnnnnnnnnnnnnnnnnnnnnnnnnnnnnnnnnnnnnnnnnnnnnnnnnnnnnnnnnnnnnnnnnnnnnnnnnnnnnnnnnnnnnnnnnnnnnnnnnnnnnnnnnnnnnnnnnnnnnnnnnnnnnnnnnnnnnnnnnnnnnnnnnnnnnnnnnnnnnnnnnnnnnnnnnnnnnnnnnnnnnnnnnnnnnnnnnnnnnnnnnnnnnnnnnnnnnnnnnnnnnnnnnnnnnnnnnnnnnnnnnnnnnnnnnnnnnnnnnnnnnnnnnnnnnnnnnnnnnnnnnnnnnnnnnnnnnnnnnnnnnnnnnnnnnnnnnnnnnnnnnnnnnnnnnnnnnnnnnnnnnnnnnnnnnnnnnnnnnnnnnnnnnnnnnnnnnnnnnnnnnnnnnnnnnnnnnnnnnnnnnnnnnnnnnnnnnnnnnnnnnnnnnnnnnnnnnnnnnnnnnnnnnnnnnnnnnnnnnnnnnnnnnnnnnnnnnnnnnnnnnnnnnnnnnnnnnnnnnnnnnnnnnnnnnnnnnnnnnnnnnnnnnnnnnnnnnnnnnnnnnnnnnnnnnnnnnnnnnnnnnnnnnnnnnnnnnnnnnnnnnnnnnnnnnnnnnnnnnnnnnnnnnnnnnnnnnnnnnnnnnnnnnnnnnnnnnnnnnnnnnnnnnnnnnnnnnnnnnnnnnnnnnnnnnnnnnnnnnnnnnnnnnnnnnnnnnnnnnnnnnnnnnnnnnnnnnnnnnnnnnnnnnnnnnnnnnnnnnnnnnnnnnnnnnnnnnnnnnnnnnnnnnnnnnnnnnnnnnnnnnnnnnnnnnnnnnnnnnnnnnnnnnnnnnnnnnnnnnnnnnnnnnnnnnnnnnnnnnnnnnnnnnnnnnnnnnnnnnnnnnnnnnnnnnnnnnnnnnnnnnnnnnnnnnnnnnnnnnnnnnnnnnnnnnnnnnnnnnnnnnnnnnnnnnnnnnnnnnnnnnnnnnnnnnnnnnnnnnnnnnnnnnnnnnnnnnnnnnnnnnnnnnnnnnnnnnnnnnnnnnnnnnnnnnnnnnnnnnnnnnnnnnnnnnnnnnnnnnnnnnnnnnnnnnnnnnnnnnnnnnnnnnnnnnnnnnnnnnnnnnnnnnnnnnnnnnnnnnnnnnnnnnnnnnnnnnnnnnnnnnnnnnnnnnnnnnnnnnnnnnnnnnnnnnnnnnnnnnnnnnnnnnnnnnnnnnnnnnnnnnnnnnnnnnnnnnnnnnnnnnnnnnnnnnnnnnnnnnnnnnnnnnnnnnnnnnnnnnnnnnnnnnnnnnnnnnnnnnnnnnnnnnnnnnnnnnnnnnnnnnnnnnnnnnnnnnnnnnnnnnnnnnnnnnnnnnnnnnnnnnnnnnnnnnnnnnnnnnnnnnnnnnnnnnnnnnnnnnnnnnnnnnnnnnnnnnnnnnnnnnnnnnnnnnnnnnnnnnnnnnnnnnnnnnnnnnnnnnnnnnnnnnnnnnnnnnnnnnnnnnnnnnnnnnnnnnnnnnnnnnnnnnnnnnnnnnnnnnnnnnnnnnnnnnnnnnnnnnnnnnnnnnnnnnnnnnnnnnnnnnnnnnnnnnnnnnnnnnnnnnnnnnnnnnnnnnnnnnnnnnnnnnnnnnnnnnnnnnnnnnnnnnnnnnnnnnnnnnnnnnnnnnnnnnnnnnnnnnnnnnnnnnnnnnnnnnnnnnnnnnnnnnnnnnnnnnnnnnnnnnnnnnnnnnnnnnnnnnnnnnnnnnnnnnnnnnnnnnnnnnnnnnnnnnnnnnnnnnnnnnnnnnnnnnnnnnnnnnnnnnnnnnnnnnnnnnnnnnnnnnnnnnnnnnnnnnnnnnnnnnnnnnnnnnnnnnnnnnnnnnnnnnnnnnnnnnnnnnnnnnnnnnnnnnnnnnnnnnnnnnnnnnnnnnnnnnnnnnnnnnnnnnnnnnnnnnnnnnnnnnnnnnnnnnnnnnnnnnnnnnnnnnnnnnnnnnnnnnnnnnnnnnnnnnnnnnnnnnnnnnnnnnnnnnnnnnnnnnnnnnnnnnnnnnnnnnnnnnnnnnnnnnnnnnnnnnnnnnnnnnnnnnnnnnnnnnnnnnnnnnnnnnnnnnnnnnnnnnnnnnnnnnnnnnnnnnnnnnnnnnnnnnnnnnnnnnnnnnnnnnnnnnnnnnnnnnnnnnnnnnnnnnnnnnnnnnnnnnnnnnnnnnnnnnnnnnnnnnnnnnnnnnnnnnnnnnnnnnnnnnnnnnnnnnnnnnnnnnnnnnnnnnnnnnnnnnnnnnnnnnnnnnnnnnnnnnnnnnnnnnnnnnnnnnnnnnnnnnnnnnnnnnnnnnnnnnnnnnnnnnnnnnnnnnnnnnnnnnnnnnnnnnnnnnnnnnnnnnnnnnnnnnnnnnnnnnnnnnnnnnnnnnnnnnnnnnnnnnnnnnnnnnnnnnnnnnnnnnnnnnnnnnnnnnnnnnnnnnnnnnnnnnnnnnnnnnnnnnnnnnnnnnnnnnnnnnnnnnnnnnnnnnnnnnnnnnnnnnnnnnnnnnnnnnnnnnnnnnnnnnnnnnnnnnnnnnnnnnnnnnnnnnnnnnnnnnnnnnnnnnnnnnnnnnnnnnnnnnnnnnnnnnnnnnnnnnnnnnnnnnnnnnnnnnnnnnnnnnnnnnnnnnnnnnnnnnnnnnnnnnnnnnnnnnnnnnnnnnnnnnnnnnnnnnnnnnnnnnnnnnnnnnnnnnnnnnnnnnnnnnnnnnnnnnnnnnnnnnnnnnnnnnnnnnnnnnnnnnnnnnnnnnnnnnnnnnnnnnnnnnnnnnnnnnnnnnnnnnnnnnnnnnnnnnnnnnnnnnnnnnnnnnnnnnnnnnnnnnnnnnnnnnnnnnnnnnnnnnnnnnnnnnnnnnnnnnnnnnnnnnnnnnnnnnnnnnnnnnnnnnnnnnnnnnnnnnnnnnnnnnnnnnnnnnnnnnnnnnnnnnnnnnnnnnnnnnnnnnnnnnnnnnnnnnnnnnnnnnnnnnnnnnnnnnnnnnnnnnnnnnnnnnnnnnnnnnnnnnnnnnnnnnnnnnnnnnnnnnnnnnnnnnnnnnnnnnnnnnnnnnnnnnnnnnnnnnnnnnnnnnnnnnnnnnnnnnnnnnnnnnnnnnnnnnnnnnnnnnnnnnnnnnnnnnnnnnnnnnnnnnnnnnnnnnnnnnnnnnnnnnnnnnnnnnnnnnnnnnnnnnnnnnnnnnnnnnnnnnnnnnnnnnnnnnnnnnnnnnnnnnnnnnnnnnnnnnnnnnnnnnnnnnnnnnnnnnnnnnnnnnnnnnnnnnnnnnnnnnnnnnnnnnnnnnnnnnnnnnnnnnnnnnnnnnnnnnnnnnnnnnnnnnnnnnnnnnnnnnnnnnnnnnnnnnnnnnnnnnnnnnnnnnnnnnnnnnnnnnnnnnnnnnnnnnnnnnnnnnnnnnnnnnnnnnnnnnnnnnnnnnnnnnnnnnnnnnnnnnnnnnnnnnnnnnnnnnnnnnnnnnnnnnnnnnnnnnnnnnnnnnnnnnnnnnnnnnnnnnnnnnnnnnnnnnnnnnnnnnnnnnnnnnnnnnnnnnnnnnnnnnnnnnnnnnnnnnnnnnnnnnnnnnnnnnnnnnnnnnnnnnnnnnnnnnnnnnnnnnnnnnnnnnnnnnnnnnnnnnnnnnnnnnnnnnnnnnnnnnnnnnnnnnnnnnnnnnnnnnnnnnnnnnnnnnnnnnnnnnnnnnnnnnnnnnnnnnnnnnnnnnnnnnnnnnnnnnnnnnnnnnnnnnnnnnnnnnnnnnnnnnnnnnnnnnnnnnnnnnnnnnnnnnnnnnnnnnnnnnnnnnnnnnnnnnnnnnnnnnnnnnnnnnnnnnnnnnnnnnnnnnnnnnnnnnnnnnnnnnnnnnnnnnnnnnnnnnnnnnnnnnnnnnnnnnnnnnnnnnnnnnnnnnnnnnnnnnnnnnnnnnnnnnnnnnnnnnnnnnnnnnnnnnnnnnnnnnnnnnnnnnnnnnnnnnnnnnnnnnnnnnnnnnnnnnnnnnnnnnnnnnnnnnnnnnnnnnnnnnnnnnnnnnnnnnnnnnnnnnnnnnnnnnnnnnnnnnnnnnnnnnnnnnnnnnnnnnnnnnnnnnnnnnnnnnnnnnnnnnnnnnnnnnnnnnnnnnnnnnnnnnnnnnnnnnnnnnnnnnnnnnnnnnnnnnnnnnnnnnnnnnnnnnnnnnnnnnnnnnnnnnnnnnnnnnnnnnnnnnnnnnnnnnnnnnnnnnnnnnnnnnnnnnnnnnnnnnnnnnnnnnnnnnnnnnnnnnnnnnnnnnnnnnnnnnnnnnnnnnnnnnnnnnnnnnnnnnnnnnnnnnnnnnnnnnnnnnnnnnnnnnnnnnnnnnnnnnnnnnnnnnnnnnnnnnnnnnnnnnnnnnnnnnnnnnnnnnnnnnnnnnnnnnnnnnnnnnnnnnnnnnnnnnnnnnnnnnnnnnnnnnnnnnnnnnnnnnnnnnnnnnnnnnnnnnnnnnnnnnnnnnnnnnnnnnnnnnnnnnnnnnnnnnnnnnnnnnnnnnnnnnnnnnnnnnnnnnnnnnnnnnnnnnnnnnnnnnnnnnnnnnnnnnnnnnnnnnnnnnnnnnnnnnnnnnnnnnnnnnnnnnnnnnnnnnnnnnnnnnnnnnnnnnnnnnnnnnnnnnnnnnnnnnnnnnnnnnnnnnnnnnnnnnnnnnnnnnnnnnnnnnnnnnnnnnnnnnnnnnnnnnnnnnnnnnnnnnnnnnnnnnnnnnnnnnnnnnnnnnnnnnnnnnnnnnnnnnnnnnnnnnnnnnnnnnnnnnnnnnnnnnnnnnnnnnnnnnnnnnnnnnnnnnnnnnnnnnnnnnnnnnnnnnnnnnnnnnnnnnnnnnnnnnnnnnnnnnnnnnnnnnnnnnnnnnnnnnnnnnnnnnnnnnnnnnnnnnnnnnnnnnnnnnnnnnnnnnnnnnnnnnnnnnnnnnnnnnnnnnnnnnnnnnnnnnnnnnnnnnnnnnnnnnnnnnnnnnnnnnnnnnnnnnnnnnnnnnnnnnnnnnnnnnnnnnnnnnnnnnnnnnnnnnnnnnnnnnnnnnnnnnnnnnnnnnnnnnnnnnnnnnnnnnnnnnnnnnnnnnnnnnnnnnnnnnnnnnnnnnnnnnnnnnnnnnnnnnnnnnnnnnnnnnnnnnnnnnnnnnnnnnnnnnnnnnnnnnnnnnnnnnnnnnnnnnnnnnnnnnnnnnnnnnnnnnnnnnnnnnnnnnnnnnnnnnnnnnnnnnnnnnnnnnnnnnnnnnnnnnnnnnnnnnnnnnnnnnnnnnnnnnnnnnnnnnnnnnnnnnnnnnnnnnnnnnnnnnnnnnnnnnnnnnnnnnnnnnnnnnnnnnnnnnnnnnnnnnnnnnnnnnnnnnnnnnnnnnnnnnnnnnnnnnnnnnnnnnnnnnnnnnnnnnnnnnnnnnnnnnnnnnnnnnnnnnnnnnnnnnnnnnnnnnnnnnnnnnnnnnnnnnnnnnnnnnnnnnnnnnnnnnnnnnnnnnnnnnnnnnnnnnnnnnnnnnnnnnnnnnnnnnnnnnnnnnnnnnnnnnnnnnnnnnnnnnnnnnnnnnnnnnnnnnnnnnnnnnnnnnnnnnnnnnnnnnnnnnnnnnnnnnnnnnnnnnnnnnnnnnnnnnnnnnnnnnnnnnnnnnnnnnnnnnnnnnnnnnnnnnnnnnnnnnnnnnnnnnnnnnnnnnnnnnnnnnnnnnnnnnnnnnnnnnnnnnnnnnnnnnnnnnnnnnnnnnnnnnnnnnnnnnnnnnnnnnnnnnnnnnnnnnnnnnnnnnnnnnnnnnnnnnnnnnnnnnnnnnnnnnnnnnnnnnnnnnnnnnnnnnnnnnnnnnnnnnnnnnnnnnnnnnnnnnnnnnnnnnnnnnnnnnnnnnnnnnnnnnnnnnnnnnnnnnnnnnnnnnnnnnnnnnnnnnnnnnnnnnnnnnnnnnnnnnnnnnnnnnnnnnnnnnnnnnnnnnnnnnnnnnnnnnnnnnnnnnnnnnnnnnnnnnnnnnnnnnnnnnnnnnnnnnnnnnnnnnnnnnnnnnnnnnnnnnnnnnnnnnnnnnnnnnnnnnnnnnnnnnnnnnnnnnnnnnnnnnnnnnnnnnnnnnnnnnnnnnnnnnnnnnnnnnnnnnnnnnnnnnnnnnnnnnnnnnnnnnnnnnnnnnnnnnnnnnnnnnnnnnnnnnnnnnnnnnnnnnnnnnnnnnnnnnnnnnnnnnnnnnnnnnnnnnnnnnnnnnnnnnnnnnnnnnnnnnnnnnnnnnnnnnnnnnnnnnnnnnnnnnnnnnnnnnnnnnnnnnnnnnnnnnnnnnnnnnnnnnnnnnnnnnnnnnnnnnnnnnnnnnnnnnnnnnnnnnnnnnnnnnnnnnnnnnnnnnnnnnnnnnnnnnnnnnnnnnnnnnnnnnnnnnnnnnnnnnnnnnnnnnnnnnnnnnnnnnnnnnnnnnnnnnnnnnnnnnnnnnnnnnnnnnnnnnnnnnnnnnnnnnnnnnnnnnnnnnnnnnnnnnnnnnnnnnnnnnnnnnnnnnnnnnnnnnnnnnnnnnnnnnnnnnnnnnnnnnnnnnnnnnnnnnnnnnnnnnnnnnnnnnnnnnnnnnnnnnnnnnnnnnnnnnnnnnnnnnnnnnnnnnnnnnnnnnnnnnnnnnnnnnnnnnnnnnnnnnnnnnnnnnnnnnnnnnnnnnnnnnnnnnnnnnnnnnnnnnnnnnnnnnnnnnnnnnnnnnnnnnnnnnnnnnnnnnnnnnnnnnnnnnnnnnnnnnnnnnnnnnnnnnnnnnnnnnnnnnnnnnnnnnnnnnnnnnnnnnnnnnnnnnnnnnnnnnnnnnnnnnnnnnnnnnnnnnnnnnnnnnnnnnnnnnnnnnnnnnnnnnnnnnnnnnnnnnnnnnnnnnnnnnnnnnnnnnnnnnnnnnnnnnnnnnnnnnnnnnnnnnnnnnnnnnnnnnnnnnnnnnnnnnnnnnnnnnnnnnnnnnnnnnnnnnnnnnnnnnnnnnnnnnnnnnnnnnnnnnnnnnnnnnnnnnnnnnnnnnnnnnnnnnnnnnnnnnnnnnnnnnnnnnnnnnnnnnnnnnnnnnnnnnnnnnnnnnnnnnnnnnnnnnnnnnnnnnnnnnnnnnnnnnnnnnnnnnnnnnnnnnnnnnnnnnnnnnnnnnnnnnnnnnnnnnnnnnnnnnnnnnnnnnnnnnnnnnnnnnnnnnnnnnnnnnnnnnnnnnnnnnnnnnnnnnnnnnnnnnnnnnnnnnnnnnnnnnnnnnnnnnnnnnnnnnnnnnnnnnnnnnnnnnnnnnnnnnnnnnnnnnnnnnnnnnnnnnnnnnnnnnnnnnnnnnnnnnnnnnnnnnnnnnnnnnnnnnnnnnnnnnnnnnnnnnnnnnnnnnnnnnnnnnnnnnnnnnnnnnnnnnnnnnnnnnnnnnnnnnnnnnnnnnnnnnnnnnnnnnnnnnnnnnnnnnnnnnnnnnnnnnnnnnnnnnnnnnnnnnnnnnnnnnnnnnnnnnnnnnnnnnnnnnnnnnnnnnnnnnnnnnnnnnnnnnnnnnnnnnnnnnnnnnnnnnnnnnnnnnnnnnnnnnnnnnnnnnnnnnnnnnnnnnnnnnnnnnnnnnnnnnnnnnnnnnnnnnnnnnnnnnnnnnnnnnnnnnnnnnnnnnnnnnnnnnnnnnnnnnnnnnnnnnnnnnnnnnnnnnnnnnnnnnnnnnnnnnnnnnnnnnnnnnnnnnnnnnnnnnnnnnnnnnnnnnnnnnnnnnnnnnnnnnnnnnnnnnnnnnnnnnnnnnnnnnnnnnnnnnnnnnnnnnnnnnnnnnnnnnnnnnnnnnnnnnnnnnnnnnnnnnnnnnnnnnnnnnnnnnnnnnnnnnnnnnnnnnnnnnnnnnnnnnnnnnnnnnnnnnnnnnnnnnnnnnnnnnnnnnnnnnnnnnnnnnnnnnnnnnnnnnnnnnnnnnnnnnnnnnnnnnnnnnnnnnnnnnnnnnnnnnnnnnnnnnnnnnnnnnnnnnnnnnnnnnnnnnnnnnnnnnnnnnnnnnnnnnnnnnnnnnnnnnnnnnnnnnnnnnnnnnnnnnnnnnnnnnnnnnnnnnnnnnnnnnnnnnnnnnnnnnnnnnnnnnnnnnnnnnnnnnnnnnnnnnnnnnnnnnnnnnnnnnnnnnnnnnnnnnnnnnnnnnnnnnnnnnnnnnnnnnnnnnnnnnnnnnnnnnnnnnnnnnnnnnnnnnnnnnnnnnnnnnnnnnnnnnnnnnnnnnnnnnnnnnnnnnnnnnnnnnnnnnnnnnnnnnnnnnnnnnnnnnnnnnnnnnnnnnnnnnnnnnnnnnnnnnnnnnnnnnnnnnnnnnnnnnnnnnnnnnnnnnnnnnnnnnnnnnnnnnnnnnnnnnnnnnnnnnnnnnnnnnnnnnnnnnnnnnnnnnnnnnnnnnnnnnnnnnnnnnnnnnnnnnnnnnnnnnnnnnnnnnnnnnnnnnnnnnnnnnnnnnnnnnnnnnnnnnnnnnnnnnnnnnnnnnnnnnnnnnnnnnnnnnnnnnnnnnnnnnnnnnnnnnnnnnnnnnnnnnnnnnnnnnnnnnnnnnnnnnnnnnnnnnnnnnnnnnnnnnnnnnnnnnnnnnnnnnnnnnnnnnnnnnnnnnnnnnnnnnnnnnnnnnnnnnnnnnnnnnnnnnnnnnnnnnnnnnnnnnnnnnnnnnnnnnnnnnnnnnnnnnnnnnnnnnnnnnnnnnnnnnnnnnnnnnnnnnnnnnnnnnnnnnnnnnnnnnnnnnnnnnnnnnnnnnnnnnnnnnnnnnnnnnnnnnnnnnnnnnnnnnnnnnnnnnnnnnnnnnnnnnnnnnnnnnnnnnnnnnnnnnnnnnnnnnnnnnnnnnnnnnnnnnnnnnnnnnnnnnnnnnnnnnnnnnnnnnnnnnnnnnnnnnnnnnnnnnnnnnnnnnnnnnnnnnnnnnnnnnnnnnnnnnnnnnnnnnnnnnnnnnnnnnnnnnnnnnnnnnnnnnnnnnnnnnnnnnnnnnnnnnnnnnnnnnnnnnnnnnnnnnnnnnnnnnnnnnnnnnnnnnnnnnnnnnnnnnnnnnnnnnnnnnnnnnnnnnnnnnnnnnnnnnnnnnnnnnnnnnnnnnnnnnnnnnnnnnnnnnnnnnnnnnnnnnnnnnnnnnnnnnnnnnnnnnnnnnnnnnnnnnnnnnnnnnnnnnnnnnnnnnnnnnnnnnnnnnnnnnnnnnnnnnnnnnnnnnnnnnnnnnnnnnnnnnnnnnnnnnnnnnnnnnnnnnnnnnnnnnnnnnnnnnnnnnnnnnnnnnnnnnnnnnnnnnnnnnnnnnnnnnnnnnnnnnnnnnnnnnnnnnnnnnnnnnnnnnnnnnnnnnnnnnnnnnnnnnnnnnnnnnnnnnnnnnnnnnnnnnnnnnnnnnnnnnnnnnnnnnnnnnnnnnnnnnnnnnnnnnnnnnnnnnnnnnnnnnnnnnnnnnnnnnnnnnnnnnnnnnnnnnnnnnnnnnnnnnnnnnnnnnnnnnnnnnnnnnnnnnnnnnnnnnnnnnnnnnnnnnnnnnnnnnnnnnnnnnnnnnnnnnnnnnnnnnnnnnnnnnnnnnnnnnnnnnnnnnnnnnnnnnnnnnnnnnnnnnnnnnnnnnnnnnnnnnnnnnnnnnnnnnnnnnnnnnnnnnnnnnnnnnnnnnnnnnnnnnnnnnnnnnnnnnnnnnnnnnnnnnnnnnnnnnnnnnnnnnnnnnnnnnnnnnnnnnnnnnnnnnnnnnnnnnnnnnnnnnnnnnnnnnnnnnnnnnnnnnnnnnnnnnnnnnnnnnnnnnnnnnnnnnnnnnnnnnnnnnnnnnnnnnnnnnnnnnnnnnnnnnnnnnnnnnnnnnnnnnnnnnnnnnnnnnnnnnnnnnnnnnnnnnnnnnnnnnnnnnnnnnnnnnnnnnnnnnnnnnnnnnnnnnnnnnnnnnnnnnnnnnnnnnnnnnnnnnnnnnnnnnnnnnnnnnnnnnnnnnnnnnnnnnnnnnnnnnnnnnnnnnnnnnnnnnnnnnnnnnnnnnnnnnnnnnnnnnnnnnnnnnnnnnnnnnnnnnnnnnnnnnnnnnnnnnnnnnnnnnnnnnnnnnnnnnnnnnnnnnnnnnnnnnnnnnnnnnnnnnnnnnnnnnnnnnnnnnnnnnnnnnnnnnnnnnnnnnnnnnnnnnnnnnnnnnnnnnnnnnnnnnnnnnnnnnnnnnnnnnnnnnnnnnnnnnnnnnnnnnnnnnnnnnnnnnnnnnnnnnnnnnnnnnnnnnnnnnnnnnnnnnnnnnnnnnnnnnnnnnnnnnnnnnnnnnnnnnnnnnnnnnnnnnnnnnnnnnnnnnnnnnnnnnnnnnnnnnnnnnnnnnnnnnnnnnnnnnnnnnnnnnnnnnnnnnnnnnnnnnnnnnnnnnnnnnnnnnnnnnnnnnnnnnnnnnnnnnnnnnnnnnnnnnnnnnnnnnnnnnnnnnnnnnnnnnnnnnnnnnnnnnnnnnnnnnnnnnnnnnnnnnnnnnnnnnnnnnnnnnnnnnnnnnnnnnnnnnnnnnnnnnnnnnnnnnnnnnnnnnnnnnnnnnnnnnnnnnnnnnnnnnnnnnnnnnnnnnnnnnnnnnnnnnnnnnnnnnnnnnnnnnnnnnnnnnnnnnnnnnnnnnnnnnnnnnnnnnnnnnnnnnnnnnnnnnnnnnnnnnnnnnnnnnnnnnnnnnnnnnnnnnnnnnnnnnnnnnnnnnnnnnnnnnnnnnnnnnnnnnnnnnnnnnnnnnnnnnnnnnnnnnnnnnnnnnnnnnnnnnnnnnnnnnnnnnnnnnnnnnnnnnnnnnnnnnnnnnnnnnnnnnnnnnnnnnnnnnnnnnnnnnnnnnnnnnnnnnnnnnnnnnnnnnnnnnnnnnnnnnnnnnnnnnnnnnnnnnnnnnnnnnnnnnnnnnnnnnnnnnnnnnnnnnnnnnnnnnnnnnnnnnnnnnnnnnnnnnnnnnnnnnnnnnnnnnnnnnnnnnnnnnnnnnnnnnnnnnnnnnnnnnnnnnnnnnnnnnnnnnnnnnnnnnnnnnnnnnnnnnnnnnnnnnnnnnnnnnnnnnnnnnnnnnnnnnnnnnnnnnnnnnnnnnnnnnnnnnnnnnnnnnnnnnnnnnnnnnnnnnnnnnnnnnnnnnnnnnnnnnnnnnnnnnnnnnnnnnnnnnnnnnnnnnnnnnnnnnnnnnnnnnnnnnnnnnnnnnnnnnnnnnnnnnnnnnnnnnnnnnnnnnnnnnnnnnnnnnnnnnnnnnnnnnnnnnnnnnnnnnnnnnnnnnnnnnnnnnnnnnnnnnnnnnnnnnnnnnnnnnnnnnnnnnnnnnnnnnnnnnnnnnnnnnnnnnnnnnnnnnnnnnnnnnnnnnnnnnnnnnnnnnnnnnnnnnnnnnnnnnnnnnnnnnnnnnnnnnnnnnnnnnnnnnnnnnnnnnnnnnnnnnnnnnnnnnnnnnnnnnnnnnnnnnnnnnnnnnnnnnnnnnnnnnnnnnnnnnnnnnnnnnnnnnnnnnnnnnnnnnnnnnnnnnnnnnnnnnnnnnnnnnnnnnnnnnnnnnnnnnnnnnnnnnnnnnnnnnnnnnnnnnnnnnnnnnnnnnnnnnnnnnnnnnnnnnnnnnnnnnnnnnnnnnnnnnnnnnnnnnnnnnnnnnnnnnnnnnnnnnnnnnnnnnnnnnnnnnnnnnnnnnnnnnnnnnnnnnnnnnnnnnnnnnnnnnnnnnnnnnnnnnnnnnnnnnnnnnnnnnnnnnnnnnnnnnnnnnnnnnnnnnnnnnnnnnnnnnnnnnnnnnnnnnnnnnnnnnnnnnnnnnnnnnnnnnnnnnnnnnnnnnnnnnnnnnnnnnnnnnnnnnnnnnnnnnnnnnnnnnnnnnnnnnnnnnnnnnnnnnnnnnnnnnnnnnnnnnnnnnnnnnnnnnnnnnnnnnnnnnnnnnnnnnnnnnnnnnnnnnnnnnnnnnnnnnnnnnnnnnnnnnnnnnnnnnnnnnnnnnnnnnnnnnnnnnnnnnnnnnnnnnnnnnnnnnnnnnnnnnnnnnnnnnnnnnnnnnnnnnnnnnnnnnnnnnnnnnnnnnnnnnnnnnnnnnnnnnnnnnnnnnnnnnnnnnnnnnnnnnnnnnnnnnnnnnnnnnnnnnnnnnnnnnnnnnnnnnnnnnnnnnnnnnnnnnnnnnnnnnnnnnnnnnnnnnnnnnnnnnnnnnnnnnnnnnnnnnnnnnnnnnnnnnnnnnnnnnnnnnnnnnnnnnnnnnnnnnnnnnnnnnnnnnnnnnnnnnnnnnnnnnnnnnnnnnnnnnnnnnnnnnnnnnnnnnnnnnnnnnnnnnnnnnnnnnnnnnnnnnnnnnnnnnnnnnnnnnnnnnnnnnnnnnnnnnnnnnnnnnnnnnnnnnnnnnnnnnnnnnnnnnnnnnnnnnnnnnnnnnnnnnnnnnnnnnnnnnnnnnnnnnnnnnnnnnnnnnnnnnnnnnnnnnnnnnnnnnnnnnnnnnnnnnnnnnnnnnnnnnnnnnnnnnnnnnnnnnnnnnnnnnnnnnnnnnnnnnnnnnnnnnnnnnnnnnnnnnnnnnnnnnnnnnnnnnnnnnnnnnnnnnnnnnnnnnnnnnnnnnnnnnnnnnnnnnnnnnnnnnnnnnnnnnnnnnnnnnnnnnnnnnnnnnnnnnnnnnnnnnnnnnnnnnnnnnnnnnnnnnnnnnnnnnnnnnnnnnnnnnnnnnnnnnnnnnnnnnnnnnnnnnnnnnnnnnnnnnnnnnnnnnnnnnnnnnnnnnnnnnnnnnnnnnnnnnnnnnnnnnnnnnnnnnnnnnnnnnnnnnnnnnnnnnnnnnnnnnnnnnnnnnnnnnnnnnnnnnnnnnnnnnnnnnnnnnnnnnnnnnnnnnnnnnnnnnnnnnnnnnnnnnnnnnnnnnnnnnnnnnnnnnnnnnnnnnnnnnnnnnnnnnnnnnnnnnnnnnnnnnnnnnnnnnnnnnnnnnnnnnnnnnnnnnnnnnnnnnnnnnnnnnnnnnnnnnnnnnnnnnnnnnnnnnnnnnnnnnnnnnnnnnnnnnnnnnnnnnnnnnnnnnnnnnnnnnnnnnnnnnnnnnnnnnnnnnnnnnnnnnnnnnnnnnnnnnnnnnnnnnnnnnnnnnnnnnnnnnnnnnnnnnnnnnnnnnnnnnnnnnnnnnnnnnnnnnnnnnnnnnnnnnnnnnnnnnnnnnnnnnnnnnnnnnnnnnnnnnnnnnnnnnnnnnnnnnnnnnnnnnnnnnnnnnnnnnnnnnnnnnnnnnnnnnnnnnnnnnnnnnnnnnnnnnnnnnnnnnnnnnnnnnnnnnnnnnnnnnnnnnnnnnnnnnnnnnnnnnnnnnnnnnnnnnnnnnnnnnnnnnnnnnnnnnnnnnnnnnnnnnnnnnnnnnnnnnnnnnnnnnnnnnnnnnnnnnnnnnnnnnnnnnnnnnnnnnnnnnnnnnnnnnnnnnnnnnnnnnnnnnnnnnnnnnnnnnnnnnnnnnnnnnnnnnnnnnnnnnnnnnnnnnnnnnnnnnnnnnnnnnnnnnnnnnnnnnnnnnnnnnnnnnnnnnnnnnnnnnnnnnnnnnnnnnnnnnnnnnnnnnnnnnnnnnnnnnnnnnnnnnnnnnnnnnnnnnnnnnnnnnnnnnnnnnnnnnnnnnnnnnnnnnnnnnnnnnnnnnnnnnnnnnnnnnnnnnnnnnnnnnnnnnnnnnnnnnnnnnnnnnnnnnnnnnnnnnnnnnnnnnnnnnnnnnnnnnnnnnnnnnnnnnnnnnnnnnnnnnnnnnnnnnnnnnnnnnnnnnnnnnnnnnnnnnnnnnnnnnnnnnnnnnnnnnnnnnnnnnnnnnnnnnnnnnnnnnnnnnnnnnnnnnnnnnnnnnnnnnnnnnnnnnnnnnnnnnnnnnnnnnnnnnnnnnnnnnnnnnnnnnnnnnnnnnnnnnnnnnnnnnnnnnnnnnnnnnnnnnnnnnnnnnnnnnnnnnnnnnnnnnnnnnnnnnnnnnnnnnnnnnnnnnnnnnnnnnnnnnnnnnnnnnnnnnnnnnnnnnnnnnnnnnnnnnnnnnnnnnnnnnnnnnnnnnnnnnnnnnnnnnnnnnnnnnnnnnnnnnnnnnnnnnnnnnnnnnnnnnnnnnnnnnnnnnnnnnnnnnnnnnnnnnnnnnnnnnnnnnnnnnnnnnnnnnnnnnnnnnnnnnnnnnnnnnnnnnnnnnnnnnnnnnnnnnnnnnnnnnnnnnnnnnnnnnnnnnnnnnnnnnnnnnnnnnnnnnnnnnnnnnnnnnnnnnnnnnnnnnnnnnnnnnnnnnnnnnnnnnnnnnnnnnnnnnnnnnnnnnnnnnnnnnnnnnnnnnnnnnnnnnnnnnnnnnnnnnnnnnnnnnnnnnnnnnnnnnnnnnnnnnnnnnnnnnnnnnnnnnnnnnnnnnnnnnnnnnnnnnnnnnnnnnnnnnnnnnnnnnnnnnnnnnnnnnnnnnnnnnnnnnnnnnnnnnnnnnnnnnnnnnnnnnnnnnnnnnnnnnnnnnnnnnnnnnnnnnnnnnnnnnnnnnnnnnnnnnnnnnnnnnnnnnnnnnnnnnnnnnnnnnnnnnnnnnnnnnnnnnnnnnnnnnnnnnnnnnnnnnnnnnnnnnnnnnnnnnnnnnnnnnnnnnnnnnnnnnnnnnnnnnnnnnnnnnnnnnnnnnnnnnnnnnnnnnnnnnnnnnnnnnnnnnnnnnnnnnnnnnnnnnnnnnnnnnnnnnnnnnnnnnnnnnnnnnnnnnnnnnnnnnnnnnnnnnnnnnnnnnnnnnnnnnnnnnnnnnnnnnnnnnnnnnnnnnnnnnnnnnnnnnnnnnnnnnnnnnnnnnnnnnnnnnnnnnnnnnnnnnnnnnnnnnnnnnnnnnnnnnnnnnnnnnnnnnnnnnnnnnnnnnnnnnnnnnnnnnnnnnnnnnnnnnnnnnnnnnnnnnnnnnnnnnnnnnnnnnnnnnnnnnnnnnnnnnnnnnnnnnnnnnnnnnnnnnnnnnnnnnnnnnnnnnnnnnnnnnnnnnnnnnnnnnnnnnnnnnnnnnnnnnnnnnnnnnnnnnnnnnnnnnnnnnnnnnnnnnnnnnnnnnnnnnnnnnnnnnnnnnnnnnnnnnnnnnnnnnnnnnnnnnnnnnnnnnnnnnnnnnnnnnnnnnnnnnnnnnnnnnnnnnnnnnnnnnnnnnnnnnnnnnnnnnnnnnnnnnnnnnnnnnnnnnnnnnnnnnnnnnnnnnnnnnnnnnnnnnnnnnnnnnnnnnnnnnnnnnnnnnnnnnnnnnnnnnnnnnnnnnnnnnnnnnnnnnnnnnnnnnnnnnnnnnnnnnnnnnnnnnnnnnnnnnnnnnnnnnnnnnnnnnnnnnnnnnnnnnnnnnnnnnnnnnnnnnnnnnnnnnnnnnnnnnnnnnnnnnnnnnnnnnnnnnnnnnnnnnnnnnnnnnnnnnnnnnnnnnnnnnnnnnnnnnnnnnnnnnnnnnnnnnnnnnnnnnnnnnnnnnnnnnnnnnnnnnnnnnnnnnnnnnnnnnnnnnnnnnnnnnnnnnnnnnnnnnnnnnnnnnnnnnnnnnnnnnnnnnnnnnnnnnnnnnnnnnnnnnnnnnnnnnnnnnnnnnnnnnnnnnnnnnnnnnnnnnnnnnnnnnnnnnnnnnnnnnnnnnnnnnnnnnnnnnnnnnnnnnnnnnnnnnnnnnnnnnnnnnnnnnnnnnnnnnnnnnnnnnnnnnnnnnnnnnnnnnnnnnnnnnnnnnnnnnnnnnnnnnnnnnnnnnnnnnnnnnnnnnnnnnnnnnnnnnnnnnnnnnnnnnnnnnnnnnnnnnnnnnnnnnnnnnnnnnnnnnnnnnnnnnnnnnnnnnnnnnnnnnnnnnnnnnnnnnnnnnnnnnnnnnnnnnnnnnnnnnnnnnnnnnnnnnnnnnnnnnnnnnnnnnnnnnnnnnnnnnnnnnnnnnnnnnnnnnnnnnnnnnnnnnnnnnnnnnnnnnnnnnnnnnnnnnnnnnnnnnnnnnnnnnnnnnnnnnnnnnnnnnnnnnnnnnnnnnnnnnnnnnnnnnnnnnnnnnnnnnnnnnnnnnnnnnnnnnnnnnnnnnnnnnnnnnnnnnnnnnnnnnnnnnnnnnnnnnnnnnnnnnnnnnnnnnnnnnnnnnnnnnnnnnnnnnnnnnnnnnnnnnnnnnnnnnnnnnnnnnnnnnnnnnnnnnnnnnnnnnnnnnnnnnnnnnnnnnnnnnnnnnnnnnnnnnnnnnnnnnnnnnnnnnnnnnnnnnnnnnnnnnnnnnnnnnnnnnnnnnnnnnnnnnnnnnnnnnnnnnnnnnnnnnnnnnnnnnnnnnnnnnnnnnnnnnnnnnnnnnnnnnnnnnnnnnnnnnnnnnnnnnnnnnnnnnnnnnnnnnnnnnnnnnnnnnnnnnnnnnnnnnnnnnnnnnnnnnnnnnnnnnnnnnnnnnnnnnnnnnnnnnnnnnnnnnnnnnnnnnnnnnnnnnnnnnnnnnnnnnnnnnnnnnnnnnnnnnnnnnnnnnnnnnnnnnnnnnnnnnnnnnnnnnnnnnnnnnnnnnnnnnnnnnnnnnnnnnnnnnnnnnnnnnnnnnnnnnnnnnnnnnnnnnnnnnnnnnnnnnnnnnnnnnnnnnnnnnnnnnnnnnnnnnnnnnnnnnnnnnnnnnnnnnnnnnnnnnnnnnnnnnnnnnnnnnnnnnnnnnnnnnnnnnnnnnnnnnnnnnnnnnnnnnnnnnnnnnnnnnnnnnnnnnnnnnnnnnnnnnnnnnnnnnnnnnnnnnnnnnnnnnnnnnnnnnnnnnnnnnnnnnnnnnnnnnnnnnnnnnnnnnnnnnnnnnnnnnnnnnnnnnnnnnnnnnnnnnnnnnnnnnnnnnnnnnnnnnnnnnnnnnnnnnnnnnnnnnnnnnnnnnnnnnnnnnnnnnnnnnnnnnnnnnnnnnnnnnnnnnnnnnnnnnnnnnnnnnnnnnnnnnnnnnnnnnnnnnnnnnnnnnnnnnnnnnnnnnnnnnnnnnnnnnnnnnnnnnnnnnnnnnnnnnnnnnnnnnnnnnnnnnnnnnnnnnnnnnnnnnnnnnnnnnnnnnnnnnnnnnnnnnnnnnnnnnnnnnnnnnnnnnnnnnnnnnnnnnnnnnnnnnnnnnnnnnnnnnnnnnnnnnnnnnnnnnnnnnnnnnnnnnnnnnnnnnnnnnnnnnnnnnnnnnnnnnnnnnnnnnnnnnnnnnnnnnnnnnnnnnnnnnnnnnnnnnnnnnnnnnnnnnnnnnnnnnnnnnnnnnnnnnnnnnnnnnnnnnnnnnnnnnnnnnnnnnnnnnnnnnnnnnnnnnnnnnnnnnnnnnnnnnnnnnnnnnnnnnnnnnnnnnnnnnnnnnnnnnnnnnnnnnnnnnnnnnnnnnnnnnnnnnnnnnnnnnnnnnnnnnnnnnnnnnnnnnnnnnnnnnnnnnnnnnnnnnnnnnnnnnnnnnnnnnnnnnnnnnnnnnnnnnnnnnnnnnnnnnnnnnnnnnnnnnnnnnnnnnnnnnnnnnnnnnnnnnnnnnnnnnnnnnnnnnnnnnnnnnnnnnnnnnnnnnnnnnnnnnnnnnnnnnnnnnnnnnnnnnnnnnnnnnnnnnnnnnnnnnnnnnnnnnnnnnnnnnnnnnnnnnnnnnnnnnnnnnnnnnnnnnnnnnnnnnnnnnnnnnnnnnnnnnnnnnnnnnnnnnnnnnnnnnnnnnnnnnnnnnnnnnnnnnnnnnnnnnnnnnnnnnnnnnnnnnnnnnnnnnnnnnnnnnnnnnnnnnnnnnnnnnnnnnnnnnnnnnnnnnnnnnnnnnnnnnnnnnnnnnnnnnnnnnnnnnnnnnnnnnnnnnnnnnnnnnnnnnnnnnnnnnnnnnnnnnnnnnnnnnnnnnnnnnnnnnnnnnnnnnnnnnnnnnnnnnnnnnnnnnnnnnnnnnnnnnnnnnnnnnnnnnnnnnnnnnnnnnnnnnnnnnnnnnnnnnnnnnnnnnnnnnnnnnnnnnnnnnnnnnnnnnnnnnnnnnnnnnnnnnnnnnnnnnnnnnnnnnnnnnnnnnnnnnnnnnnnnnnnnnnnnnnnnnnnnnnnnnnnnnnnnnnnnnnnnnnnnnnnnnnnnnnnnnnnnnnnnnnnnnnnnnnnnnnnnnnnnnnnnnnnnnnnnnnnnnnnnnnnnnnnnnnnnnnnnnnnnnnnnnnnnnnnnnnnnnnnnnnnnnnnnnnnnnnnnnnnnnnnnnnnnnnnnnnnnnnnnnnnnnnnnnnnnnnnnnnnnnnnnnnnnnnnnnnnnnnnnnnnnnnnnnnnnnnnnnnnnnnnnnnnnnnnnnnnnnnnnnnnnnnnnnnnnnnnnnnnnnnnnnnnnnnnnnnnnnnnnnnnnnnnnnnnnnnnnnnnnnnnnnnnnnnnnnnnnnnnnnnnnnnnnnnnnnnnnnnnnnnnnnnnnnnnnnnnnnnnnnnnnnnnnnnnnnnnnnnnnnnnnnnnnnnnnnnnnnnnnnnnnnnnnnnnnnnnnnnnnnnnnnnnnnnnnnnnnnnnnnnnnnnnnnnnnnnnnnnnnnnnnnnnnnnnnnnnnnnnnnnnnnnnnnnnnnnnnnnnnnnnnnnnnnnnnnnnnnnnnnnnnnnnnnnnnnnnnnnnnnnnnnnnnnnnnnnnnnnnnnnnnnnnnnnnnnnnnnnnnnnnnnnnnnnnnnnnnnnnnnnnnnnnnnnnnnnnnnnnnnnnnnnnnnnnnnnnnnnnnnnnnnnnnnnnnnnnnnnnnnnnnnnnnnnnnnnnnnnnnnnnnnnnnnnnnnnnnnnnnnnnnnnnnnnnnnnnnnnnnnnnnnnnnnnnnnnnnnnnnnnnnnnnnnnnnnnnnnnnnnnnnnnnnnnnnnnnnnnnnnnnnnnnnnnnnnnnnnnnnnnnnnnnnnnnnnnnnnnnnnnnnnnnnnnnnnnnnnnnnnnnnnnnnnnnnnnnnnnnnnnnnnnnnnnnnnnnnnnnnnnnnnnnnnnnnnnnnnnnnnnnnnnnnnnnnnnnnnnnnnnnnnnnnnnnnnnnnnnnnnnnnnnnnnnnnnnnnnnnnnnnnnnnnnnnnnnnnnnnnnnnnnnnnnnnnnnnnnnnnnnnnnnnnnnnnnnnnnnnnnnnnnnnnnnnnnnnnnnnnnnnnnnnnnnnnnnnnnnnnnnnnnnnnnnnnnnnnnnnnnnnnnnnnnnnnnnnnnnnnnnnnnnnnnnnnnnnnnnnnnnnnnnnnnnnnnnnnnnnnnnnnnnnnnnnnnnnnnnnnnnnnnnnnnnnnnnnnnnnnnnnnnnnnnnnnnnnnnnnnnnnnnnnnnnnnnnnnnnnnnnnnnnnnnnnnnnnnnnnnnnnnnnnnnnnnnnnnnnnnnnnnnnnnnnnnnnnnnnnnnnnnnnnnnnnnnnnnnnnnnnnnnnnnnnnnnnnnnnnnnnnnnnnnnnnnnnnnnnnnnnnnnnnnnnnnnnnnnnnnnnnnnnnnnnnnnnnnnnnnnnnnnnnnnnnnnnnnnnnnnnnnnnnnnnnnnnnnnnnnnnnnnnnnnnnnnnnnnnnnnnnnnnnnnnnnnnnnnnnnnnnnnnnnnnnnnnnnnnnnnnnnnnnnnnnnnnnnnnnnnnnnnnnnnnnnnnnnnnnnnnnnnnnnnnnnnnnnnnnnnnnnnnnnnnnnnnnnnnnnnnnnnnnnnnnnnnnnnnnnnnnnnnnnnnnnnnnnnnnnnnnnnnnnnnnnnnnnnnnnnnnnnnnnnnnnnnnnnnnnnnnnnnnnnnnnnnnnnnnnnnnnnnnnnnnnnnnnnnnnnnnnnnnnnnnnnnnnnnnnnnnnnnnnnnnnnnnnnnnnnnnnnnnnnnnnnnnnnnnnnnnnnnnnnnnnnnnnnnnnnnnnnnnnnnnnnnnnnnnnnnnnnnnnnnnnnnnnnnnnnnnnnnnnnnnnnnnnnnnnnnnnnnnnnnnnnnnnnnnnnnnnnnnnnnnnnnnnnnnnnnnnnnnnnnnnnnnnnnnnnnnnnnnnnnnnnnnnnnnnnnnnnnnnnnnnnnnnnnnnnnnnnnnnnnnnnnnnnnnnnnnnnnnnnnnnnnnnnnnnnnnnnnnnnnnnnnnnnnnnnnnnnnnnnnnnnnnnnnnnnnnnnnnnnnnnnnnnnnnnnnnnnnnnnnnnnnnnnnnnnnnnnnnnnnnnnnnnnnnnnnnnnnnnnnnnnnnnnnnnnnnnnnnnnnnnnnnnnnnnnnnnnnnnnnnnnnnnnnnnnnnnnnnnnnnnnnnnnnnnnnnnnnnnnnnnnnnnnnnnnnnnnnnnnnnnnnnnnnnnnnnnnnnnnnnnnnnnnnnnnnnnnnnnnnnnnnnnnnnnnnnnnnnnnnnnnnnnnnnnnnnnnnnnnnnnnnnnnnnnnnnnnnnnnnnnnnnnnnnnnnnnnnnnnnnnnnnnnnnnnnnnnnnnnnnnnnnnnnnnnnnnnnnnnnnnnnnnnnnnnnnnnnnnnnnnnnnnnnnnnnnnnnnnnnnnnnnnnnnnnnnnnnnnnnnnnnnnnnnnnnnnnnnnnnnnnnnnnnnnnnnnnnnnnnnnnnnnnnnnnnnnnnnnnnnnnnnnnnnnnnnnnnnnnnnnnnnnnnnnnnnnnnnnnnnnnnnnnnnnnnnnnnnnnnnnnnnnnnnnnnnnnnnnnnnnnnnnnnnnnnnnnnnnnnnnnnnnnnnnnnnnnnnnnnnnnnnnnnnnnnnnnnnnnnnnnnnnnnnnnnnnnnnnnnnnnnnnnnnnnnnnnnnnnnnnnnnnnnnnnnnnnnnnnnnnnnnnnnnnnnnnnnnnnnnnnnnnnnnnnnnnnnnnnnnnnnnnnnnnnnnnnnnnnnnnnnnnnnnnnnnnnnnnnnnnnnnnnnnnnnnnnnnnnnnnnnnnnnnnnnnnnnnnnnnnnnnnnnnnnnnnnnnnnnnnnnnnnnnnnnnnnnnnnnnnnnnnnnnnnnnnnnnnnnnnnnnnnnnnnnnnnnnnnnnnnnnnnnnnnnnnnnnnnnnnnnnnnnnnnnnnnnnnnnnnnnnnnnnnnnnnnnnnnnnnnnnnnnnnnnnnnnnnnnnnnnnnnnnnnnnnnnnnnnnnnnnnnnnnnnnnnnnnnnnnnnnnnnnnnnnnnnnnnnnnnnnnnnnnnnnnnnnnnnnnnnnnnnnnnnnnnnnnnnnnnnnnnnnnnnnnnnnnnnnnnnnnnnnnnnnnnnnnnnnnnnnnnnnnnnnnnnnnnnnnnnnnnnnnnnnnnnnnnnnnnnnnnnnnnnnnnnnnnnnnnnnnnnnnnnnnnnnnnnnnnnnnnnnnnnnnnnnnnnnnnnnnnnnnnnnnnnnnnnnnnnnnnnnnnnnnnnnnnnnnnnnnnnnnnnnnnnnnnnnnnnnnnnnnnnnnnnnnnnnnnnnnnnnnnnnnnnnnnnnnnnnnnnnnnnnnnnnnnnnnnnnnnnnnnnnnnnnnnnnnnnnnnnnnnnnnnnnnnnnnnnnnnnnnnnnnnnnnnnnnnnnnnnnnnnnnnnnnnnnnnnnnnnnnnnnnnnnnnnnnnnnnnnnnnnnnnnnnnnnnnnnnnnnnnnnnnnnnnnnnnnnnnnnnnnnnnnnnnnnnnnnnnnnnnnnnnnnnnnnnnnnnnnnnnnnnnnnnnnnnnnnnnnnnnnnnnnnnnnnnnnnnnnnnnnnnnnnnnnnnnnnnnnnnnnnnnnnnnnnnnnnnnnnnnnnnnnnnnnnnnnnnnnnnnnnnnnnnnnnnnnnnnnnnnnnnnnnnnnnnnnnnnnnnnnnnnnnnnnnnnnnnnnnnnnnnnnnnnnnnnnnnnnnnnnnnnnnnnnnnnnnnnnnnnnnnnnnnnnnnnnnnnnnnnnnnnnnnnnnnnnnnnnnnnnnnnnnnnnnnnnnnnnnnnnnnnnnnnnnnnnnnnnnnnnnnnnnnnnnnnnnnnnnnnnnnnnnnnnnnnnnnnnnnnnnnnnnnnnnnnnnnnnnnnnnnnnnnnnnnnnnnnnnnnnnnnnnnnnnnnnnnnnnnnnnnnnnnnnnnnnnnnnnnnnnnnnnnnnnnnnnnnnnnnnnnnnnnnnnnnnnnnnnnnnnnnnnnnnnnnnnnnnnnnnnnnnnnnnnnnnnnnnnnnnnnnnnnnnnnnnnnnnnnnnnnnnnnnnnnnnnnnnnnnnnnnnnnnnnnnnnnnnnnnnnnnnnnnnnnnnnnnnnnnnnnnnnnnnnnnnnnnnnnnnnnnnnnnnnnnnnnnnnnnnnnnnnnnnnnnnnnnnnnnnnnnnnnnnnnnnnnnnnnnnnnnnnnnnnnnnnnnnnnnnnnnnnnnnnnnnnnnnnnnnnnnnnnnnnnnnnnnnnnnnnnnnnnnnnnnnnnnnnnnnnnnnnnnnnnnnnnnnnnnnnnnnnnnnnnnnnnnnnnnnnnnnnnnnnnnnnnnnnnnnnnnnnnnnnnnnnnnnnnnnnnnnnnnnnnnnnnnnnnnnnnnnnnnnnnnnnnnnnnnnnnnnnnnnnnnnnnnnnnnnnnnnnnnnnnnnnnnnnnnnnnnnnnnnnnnnnnnnnnnnnnnnnnnnnnnnnnnnnnnnnnnnnnnnnnnnnnnnnnnnnnnnnnnnnnnnnnnnnnnnnnnnnnnnnnnnnnnnnnnnnnnnnnnnnnnnnnnnnnnnnnnnnnnnnnnnnnnnnnnnnnnnnnnnnnnnnnnnnnnnnnnnnnnnnnnnnnnnnnnnnnnnnnnnnnnnnnnnnnnnnnnnnnnnnnnnnnnnnnnnnnnnnnnnnnnnnnnnnnnnnnnnnnnnnnnnnnnnnnnnnnnnnnnnnnnnnnnnnnnnnnnnnnnnnnnnnnnnnnnnnnnnnnnnnnnnnnnnnnnnnnnnnnnnnnnnnnnnnnnnnnnnnnnnnnnnnnnnnnnnnnnnnnnnnnnnnnnnnnnnnnnnnnnnnnnnnnnnnnnnnnnnnnnnnnnnnnnnnnnnnnnnnnnnnnnnnnnnnnnnnnnnnnnnnnnnnnnnnnnnnnnnnnnnnnnnnnnnnnnnnnnnnnnnnnnnnnnnnnnnnnnnnnnnnnnnnnnnnnnnnnnnnnnnnnnnnnnnnnnnnnnnnnnnnnnnnnnnnnnnnnnnnnnnnnnnnnnnnnnnnnnnnnnnnnnnnnnnnnnnnnnnnnnnnnnnnnnnnnnnnnnnnnnnnnnnnnnnnnnnnnnnnnnnnnnnnnnnnnnnnnnnnnnnnnnnnnnnnnnnnnnnnnnnnnnnnnnnnnnnnnnnnnnnnnnnnnnnnnnnnnnnnnnnnnnnnnnnnnnnnnnnnnnnnnnnnnnnnnnnnnnnnnnnnnnnnnnnnnnnnnnnnnnnnnnnnnnnnnnnnnnnnnnnnnnnnnnnnnnnnnnnnnnnnnnnnnnnnnnnnnnnnnnnnnnnnnnnnnnnnnnnnnnnnnnnnnnnnnnnnnnnnnnnnnnnnnnnnnnnnnnnnnnnnnnnnnnnnnnnnnnnnnnnnnnnnnnnnnnnnnnnnnnnnnnnnnnnnnnnnnnnnnnnnnnnnnnnnnnnnnnnnnnnnnnnnnnnnnnnnnnnnnnnnnnnnnnnnnnnnnnnnnnnnnnnnnnnnnnnnnnnnnnnnnnnnnnnnnnnnnnnnnnnnnnnnnnnnnnnnnnnnnnnnnnnnnnnnnnnnnnnnnnnnnnnnnnnnnnnnnnnnnnnnnnnnnnnnnnnnnnnnnnnnnnnnnnnnnnnnnnnnnnnnnnnnnnnnnnnnnnnnnnnnnnnnnnnnnnnnnnnnnnnnnnnnnnnnnnnnnnnnnnnnnnnnnnnnnnnnnnnnnnnnnnnnnnnnnnnnnnnnnnnnnnnnnnnnnnnnnnnnnnnnnnnnnnnnnnnnnnnnnnnnnnnnnnnnnnnnnnnnnnnnnnnnnnnnnnnnnnnnnnnnnnnnnnnnnnnnnnnnnnnnnnnnnnnnnnnnnnnnnnnnnnnnnnnnnnnnnnnnnnnnnnnnnnnnnnnnnnnnnnnnnnnnnnnnnnnnnnnnnnnnnnnnnnnnnnnnnnnnnnnnnnnnnnnnnnnnnnnnnnnnnnnnnnnnnnnnnnnnnnnnnnnnnnnnnnnnnnnnnnnnnnnnnnnnnnnnnnnnnnnnnnnnnnnnnnnnnnnnnnnnnnnnnnnnnnnnnnnnnnnnnnnnnnnnnnnnnnnnnnnnnnnnnnnnnnnnnnnnnnnnnnnnnnnnnnnnnnnnnnnnnnnnnnnnnnnnnnnnnnnnnnnnnnnnnnnnnnnnnnnnnnnnnnnnnnnnnnnnnnnnnnnnnnnnnnnnnnnnnnnnnnnnnnnnnnnnnnnnnnnnnnnnnnnnnnnnnnnnnnnnnnnnnnnnnnnnnnnnnnnnnnnnnnnnnnnnnnnnnnnnnnnnnnnnnnnnnnnnnnnnnnnnnnnnnnnnnnnnnnnnnnnnnnnnnnnnnnnnnnnnnnnnnnnnnnnnnnnnnnnnnnnnnnnnnnnnnnnnnnnnnnnnnnnnnnnnnnnnnnnnnnnnnnnnnnnnnnnnnnnnnnnnnnnnnnnnnnnnnnnnnnnnnnnnnnnnnnnnnnnnnnnnnnnnnnnnnnnnnnnnnnnnnnnnnnnnnnnnnnnnnnnnnnnnnnnnnnnnnnnnnnnnnnnnnnnnnnnnnnnnnnnnnnnnnnnnnnnnnnnnnnnnnnnnnnnnnnnnnnnnnnnnnnnnnnnnnnnnnnnnnnnnnnnnnnnnnnnnnnnnnnnnnnnnnnnnnnnnnnnnnnnnnnnnnnnnnnnnnnnnnnnnnnnnnnnnnnnnnnnnnnnnnnnnnnnnnnnnnnnnnnnnnnnnnnnnnnnnnnnnnnnnnnnnnnnnnnnnnnnnnnnnnnnnnnnnnnnnnnnnnnnnnnnnnnnnnnnnnnnnnnnnnnnnnnnnnnnnnnnnnnnnnnnnnnnnnnnnnnnnnnnnnnnnnnnnnnnnnnnnnnnnnnnnnnnnnnnnnnnnnnnnnnnnnnnnnnnnnnnnnnnnnnnnnnnnnnnnnnnnnnnnnnnnnnnnnnnnnnnnnnnnnnnnnnnnnnnnnnnnnnnnnnnnnnnnnnnnnnnnnnnnnnnnnnnnnnnnnnnnnnnnnnnnnnnnnnnnnnnnnnnnnnnnnnnnnnnnnnnnnnnnnnnnnnnnnnnnnnnnnnnnnnnnnnnnnnnnnnnnnnnnnnnnnnnnnnnnnnnnnnnnnnnnnnnnnnnnnnnnnnnnnnnnnnnnnnnnnnnnnnnnnnnnnnnnnnnnnnnnnnnnnnnnnnnnnnnnnnnnnnnnnnnnnnnnnnnnnnnnnnnnnnnnnnnnnnnnnnnnnnnnnnnnnnnnnnnnnnnnnnnnnnnnnnnnnnnnnnnnnnnnnnnnnnnnnnnnnnnnnnnnnnnnnnnnnnnnnnnnnnnnnnnnnnnnnnnnnnnnnnnnnnnnnnnnnnnnnnnnnnnnnnnnnnnnnnnnnnnnnnnnnnnnnnnnnnnnnnnnnnnnnnnnnnnnnnnnnnnnnnnnnnnnnnnnnnnnnnnnnnnnnnnnnnnnnnnnnnnnnnnnnnnnnnnnnnnnnnnnnnnnnnnnnnnnnnnnnnnnnnnnnnnnnnnnnnnnnnnnnnnnnnnnnnnnnnnnnnnnnnnnnnnnnnnnnnnnnnnnnnnnnnnnnnnnnnnnnnnnnnnnnnnnnnnnnnnnnnnnnnnnnnnnnnnnnnnnnnnnnnnnnnnnnnnnnnnnnnnnnnnnnnnnnnnnnnnnnnnnnnnnnnnnnnnnnnnnnnnnnnnnnnnnnnnnnnnnnnnnnnnnnnnnnnnnnnnnnnnnnnnnnnnnnnnnnnnnnnnnnnnnnnnnnnnnnnnnnnnnnnnnnnnnnnnnnnnnnnnnnnnnnnnnnnnnnnnnnnnnnnnnnnnnnnnnnnnnnnnnnnnnnnnnnnnnnnnnnnnnnnnnnnnnnnnnnnnnnnnnnnnnnnnnnnnnnnnnnnnnnnnnnnnnnnnnnnnnnnnnnnnnnnnnnnnnnnnnnnnnnnnnnnnnnnnnnnnnnnnnnnnnnnnnnnnnnnnnnnnnnnnnnnnnnnnnnnnnnnnnnnnnnnnnnnnnnnnnnnnnnnnnnnnnnnnnnnnnnnnnnnnnnnnnnnnnnnnnnnnnnnnnnnnnnnnnnnnnnnnnnnnnnnnnnnnnnnnnnnnnnnnnnnnnnnnnnnnnnnnnnnnnnnnnnnnnnnnnnnnnnnnnnnnnnnnnnnnnnnnnnnnnnnnnnnnnnnnnnnnnnnnnnnnnnnnnnnnnnnnnnnnnnnnnnnnnnnnnnnnnnnnnnnnnnnnnnnnnnnnnnnnnnnnnnnnnnnnnnnnnnnnnnnnnnnnnnnnnnnnnnnnnnnnnnnnnnnnnnnnnnnnnnnnnnnnnnnnnnnnnnnnnnnnnnnnnnnnnnnnnnnnnnnnnnnnnnnnnnnnnnnnnnnnnnnnnnnnnnnnnnnnnnnnnnnnnnnnnnnnnnnnnnnnnnnnnnnnnnnnnnnnnnnnnnnnnnnnnnnnnnnnnnnnnnnnnnnnnnnnnnnnnnnnnnnnnnnnnnnnnnnnnnnnnnnnnnnnnnnnnnnnnnnnnnnnnnnnnnnnnnnnnnnnnnnnnnnnnnnnnnnnnnnnnnnnnnnnnnnnnnnnnnnnnnnnnnnnnnnnnnnnnnnnnnnnnnnnnnnnnnnnnnnnnnnnnnnnnnnnnnnnnnnnnnnnnnnnnnnnnnnnnnnnnnnnnnnnnnnnnnnnnnnnnnnnnnnnnnnnnnnnnnnnnnnnnnnnnnnnnnnnnnnnnnnnnnnnnnnnnnnnnnnnnnnnnnnnnnnnnnnnnnnnnnnnnnnnnnnnnnnnnnnnnnnnnnnnnnnnnnnnnnnnnnnnnnnnnnnnnnnnnnnnnnnnnnnnnnnnnnnnnnnnnnnnnnnnnnnnnnnnnnnnnnnnnnnnnnnnnnnnnnnnnnnnnnnnnnnnnnnnnnnnnnnnnnnnnnnnnnnnnnnnnnnnnnnnnnnnnnnnnnnnnnnnnnnnnnnnnnnnnnnnnnnnnnnnnnnnnnnnnnnnnnnnnnnnnnnnnnnnnnnnnnnnnnnnnnnnnnnnnnnnnnnnnnnnnnnnnnnnnnnnnnnnnnnnnnnnnnnnnnnnnnnnnnnnnnnnnnnnnnnnnnnnnnnnnnnnnnnnnnnnnnnnnnnnnnnnnnnnnnnnnnnnnnnnnnnnnnnnnnnnnnnnnnnnnnnnnnnnnnnnnnnnnnnnnnnnnnnnnnnnnnnnnnnnnnnnnnnnnnnnnnnnnnnnnnnnnnnnnnnnnnnnnnnnnnnnnnnnnnnnnnnnnnnnnnnnnnnnnnnnnnnnnnnnnnnnnnnnnnnnnnnnnnnnnnnnnnnnnnnnnnnnnnnnnnnnnnnnnnnnnnnnnnnnnnnnnnnnnnnnnnnnnnnnnnnnnnnnnnnnnnnnnnnnnnnnnnnnnnnnnnnnnnnnnnnnnnnnnnnnnnnnnnnnnnnnnnnnnnnnnnnnnnnnnnnnnnnnnnnnnnnnnnnnnnnnnnnnnnnnnnnnnnnnnnnnnnnnnnnnnnnnnnnnnnnnnnnnnnnnnnnnnnnnnnnnnnnnnnnnnnnnnnnnnnnnnnnnnnnnnnnnnnnnnnnnnnnnnnnnnnnnnnnnnnnnnnnnnnnnnnnnnnnnnnnnnnnnnnnnnnnnnnnnnnnnnnnnnnnnnnnnnnnnnnnnnnnnnnnnnnnnnnnnnnnnnnnnnnnnnnnnnnnnnnnnnnnnnnnnnnnnnnnnnnnnnnnnnnnnnnnnnnnnnnnnnnnnnnnnnnnnnnnnnnnnnnnnnnnnnnnnnnnnnnnnnnnnnnnnnnnnnnnnnnnnnnnnnnnnnnnnnnnnnnnnnnnnnnnnnnnnnnnnnnnnnnnnnnnnnnnnnnnnnnnnnnnnnnnnnnnnnnnnnnnnnnnnnnnnnnnnnnnnnnnnnnnnnnnnnnnnnnnnnnnnnnnnnnnnnnnnnnnnnnnnnnnnnnnnnnnnnnnnnnnnnnnnnnnnnnnnnnnnnnnnnnnnnnnnnnnnnnnnnnnnnnnnnnnnnnnnnnnnnnnnnnnnnnnnnnnnnnnnnnnnnnnnnnnnnnnnnnnnnnnnnnnnnnnnnnnnnnnnnnnnnnnnnnnnnnnnnnnnnnnnnnnnnnnnnnnnnnnnnnnnnnnnnnnnnnnnnnnnnnnnnnnnnnnnnnnnnnnnnnnnnnnnnnnnnnnnnnnnnnnnnnnnnnnnnnnnnnnnnnnnnnnnnnnnnnnnnnnnnnnnnnnnnnnnnnnnnnnnnnnnnnnnnnnnnnnnnnnnnnnnnnnnnnnnnnnnnnnnnnnnnnnnnnnnnnnnnnnnnnnnnnnnnnnnnnnnnnnnnnnnnnnnnnnnnnnnnnnnnnnnnnnnnnnnnnnnnnnnnnnnnnnnnnnnnnnnnnnnnnnnnnnnnnnnnnnnnnnnnnnnnnnnnnnnnnnnnnnnnnnnnnnnnnnnnnnnnnnnnnnnnnnnnnnnnnnnnnnnnnnnnnnnnnnnnnnnnnnnnnnnnnnnnnnnnnnnnnnnnnnnnnnnnnnnnnnnnnnnnnnnnnnnnnnnnnnnnnnnnnnnnnnnnnnnnnnnnnnnnnnnnnnnnnnnnnnnnnnnnnnnnnnnnnnnnnnnnnnnnnnnnnnnnnnnnnnnnnnnnnnnnnnnnnnnnnnnnnnnnnnnnnnnnnnnnnnnnnnnnnnnnnnnnnnnnnnnnnnnnnnnnnnnnnnnnnnnnnnnnnnnnnnnnnnnnnnnnnnnnnnnnnnnnnnnnnnnnnnnnnnnnnnnnnnnnnnnnnnnnnnnnnnnnnnnnnnnnnnnnnnnnnnnnnnnnnnnnnnnnnnnnnnnnnnnnnnnnnnnnnnnnnnnnnnnnnnnnnnnnnnnnnnnnnnnnnnnnnnnnnnnnnnnnnnnnnnnnnnnnnnnnnnnnnnnnnnnnnnnnnnnnnnnnnnnnnnnnnnnnnnnnnnnnnnnnnnnnnnnnnnnnnnnnnnnnnnnnnnnnnnnnnnnnnnnnnnnnnnnnnnnnnnnnnnnnnnnnnnnnnnnnnnnnnnnnnnnnnnnnnnnnnnnnnnnnnnnnnnnnnnnnnnnnnnnnnnnnnnnnnnnnnnnnnnnnnnnnnnnnnnnnnnnnnnnnnnnnnnnnnnnnnnnnnnnnnnnnnnnnnnnnnnnnnnnnnnnnnnnnnnnnnnnnnnnnnnnnnnnnnnnnnnnnnnnnnnnnnnnnnnnnnnnnnnnnnnnnnnnnnnnnnnnnnnnnnnnnnnnnnnnnnnnnnnnnnnnnnnnnnnnnnnnnnnnnnnnnnnnnnnnnnnnnnnnnnnnnnnnnnnnnnnnnnnnnnnnnnnnnnnnnnnnnnnnnnnnnnnnnnnnnnnnnnnnnnnnnnnnnnnnnnnnnnnnnnnnnnnnnnnnnnnnnnnnnnnnnnnnnnnnnnnnnnnnnnnnnnnnnnnnnnnnnnnnnnnnnnnnnnnnnnnnnnnnnnnnnnnnnnnnnnnnnnnnnnnnnnnnnnnnnnnnnnnnnnnnnnnnnnnnnnnnnnnnnnnnnnnnnnnnnnnnnnnnnnnnnnnnnnnnnnnnnnnnnnnnnnnnnnnnnnnnnnnnnnnnnnnnnnnnnnnnnnnnnnnnnnnnnnnnnnnnnnnnnnnnnnnnnnnnnnnnnnnnnnnnnnnnnnnnnnnnnnnnnnnnnnnnnnnnnnnnnnnnnnnnnnnnnnnnnnnnnnnnnnnnnnnnnnnnnnnnnnnnnnnnnnnnnnnnnnnnnnnnnnnnnnnnnnnnnnnnnnnnnnnnnnnnnnnnnnnnnnnnnnnnnnnnnnnnnnnnnnnnnnnnnnnnnnnnnnnnnnnnnnnnnnnnnnnnnnnnnnnnnnnnnnnnnnnnnnnnnnnnnnnnnnnnnnnnnnnnnnnnnnnnnnnnnnnnnnnnnnnnnnnnnnnnnnnnnnnnnnnnnnnnnnnnnnnnnnnnnnnnnnnnnnnnnnnnnnnnnnnnnnnnnnnnnnnnnnnnnnnnnnnnnnnnnnnnnnnnnnnnnnnnnnnnnnnnnnnnnnnnnnnnnnnnnnnnnnnnnnnnnnnnnnnnnnnnnnnnnnnnnnnnnnnnnnnnnnnnnnnnnnnnnnnnnnnnnnnnnnnnnnnnnnnnnnnnnnnnnnnnnnnnnnnnnnnnnnnnnnnnnnnnnnnnnnnnnnnnnnnnnnnnnnnnnnnnnnnnnnnnnnnnnnnnnnnnnnnnnnnnnnnnnnnnnnnnnnnnnnnnnnnnnnnnnnnnnnnnnnnnnnnnnnnnnnnnnnnnnnnnnnnnnnnnnnnnnnnnnnnnnnnnnnnnnnnnnnnnnnnnnnnnnnnnnnnnnnnnnnnnnnnnnnnnnnnnnnnnnnnnnnnnnnnnnnnnnnnnnnnnnnnnnnnnnnnnnnnnnnnnnnnnnnnnnnnnnnnnnnnnnnnnnnnnnnnnnnnnnnnnnnnnnnnnnnnnnnnnnnnnnnnnnnnnnnnnnnnnnnnnnnnnnnnnnnnnnnnnnnnnnnnnnnnnnnnnnnnnnnnnnnnnnnnnnnnnnnnnnnnnnnnnnnnnnnnnnnnnnnnnnnnnnnnnnnnnnnnnnnnnnnnnnnnnnnnnnnnnnnnnnnnnnnnnnnnnnnnnnnnnnnnnnnnnnnnnnnnnnnnnnnnnnnnnnnnnnnnnnnnnnnnnnnnnnnnnnnnnnnnnnnnnnnnnnnnnnnnnnnnnnnnnnnnnnnnnnnnnnnnnnnnnnnnnnnnnnnnnnnnnnnnnnnnnnnnnnnnnnnnnnnnnnnnnnnnnnnnnnnnnnnnnnnnnnnnnnnnnnnnnnnnnnnnnnnnnnnnnnnnnnnnnnnnnnnnnnnnnnnnnnnnnnnnnnnnnnnnnnnnnnnnnnnnnnnnnnnnnnnnnnnnnnnnnnnnnnnnnnnnnnnnnnnnnnnnnnnnnnnnnnnnnnnnnnnnnnnnnnnnnnnnnnnnnnnnnnnnnnnnnnnnnnnnnnnnnnnnnnnnnnnnnnnnnnnnnnnnnnnnnnnnnnnnnnnnnnnnnnnnnnnnnnnnnnnnnnnnnnnnnnnnnnnnnnnnnnnnnnnnnnnnnnnnnnnnnnnnnnnnnnnnnnnnnnnnnnnnnnnnnnnnnnnnnnnnnnnnnnnnnnnnnnnnnnnnnnnnnnnnnnnnnnnnnnnnnnnnnnnnnnnnnnnnnnnnnnnnnnnnnnnnnnnnnnnnnnnnnnnnnnnnnnnnnnnnnnnnnnnnnnnnnnnnnnnnnnnnnnnnnnnnnnnnnnnnnnnnnnnnnnnnnnnnnnnnnnnnnnnnnnnnnnnnnnnnnnnnnnnnnnnnnnnnnnnnnnnnnnnnnnnnnnnnnnnnnnnnnnnnnnnnnnnnnnnnnnnnnnnnnnnnnnnnnnnnnnnnnnnnnnnnnnnnnnnnnnnnnnnnnnnnnnnnnnnnnnnnnnnnnnnnnnnnnnnnnnnnnnnnnnnnnnnnnnnnnnnnnnnnnnnnnnnnnnnnnnnnnnnnnnnnnnnnnnnnnnnnnnnnnnnnnnnnnnnnnnnnnnnnnnnnnnnnnnnnnnnnnnnnnnnnnnnnnnnnnnnnnnnnnnnnnnnnnnnnnnnnnnnnnnnnnnnnnnnnnnnnnnnnnnnnnnnnnnnnnnnnnnnnnnnnnnnnnnnnnnnnnnnnnnnnnnnnnnnnnnnnnnnnnnnnnnnnnnnnnnnnnnnnnnnnnnnnnnnnnnnnnnnnnnnnnnnnnnnnnnnnnnnnnnnnnnnnnnnnnnnnnnnnnnnnnnnnnnnnnnnnnnnnnnnnnnnnnnnnnnnnnnnnnnnnnnnnnnnnnnnnnnnnnnnnnnnnnnnnnnnnnnnnnnnnnnnnnnnnnnnnnnnnnnnnnnnnnnnnnnnnnnnnnnnnnnnnnnnnnnnnnnnnnnnnnnnnnnnnnnnnnnnnnnnnnnnnnnnnnnnnnnnnnnnnnnnnnnnnnnnnnnnnnnnnnnnnnnnnnnnnnnnnnnnnnnnnnnnnnnnnnnnnnnnnnnnnnnnnnnnnnnnnnnnnnnnnnnnnnnnnnnnnnnnnnnnnnnnnnnnnnnnnnnnnnnnnnnnnnnnnnnnnnnnnnnnnnnnnnnnnnnnnnnnnnnnnnnnnnnnnnnnnnnnnnnnnnnnnnnnnnnnnnnnnnnnnnnnnnnnnnnnnnnnnnnnnnnnnnnnnnnnnnnnnnnnnnnnnnnnnnnnnnnnnnnnnnnnnnnnnnnnnnnnnnnnnnnnnnnnnnnnnnnnnnnnnnnnnnnnnnnnnnnnnnnnnnnnnnnnnnnnnnnnnnnnnnnnnnnnnnnnnnnnnnnnnnnnnnnnnnnnnnnnnnnnnnnnnnnnnnnnnnnnnnnnnnnnnnnnnnnnnnnnnnnnnnnnnnnnnnnnnnnnnnnnnnnnnnnnnnnnnnnnnnnnnnnnnnnnnnnnnnnnnnnnnnnnnnnnnnnnnnnnnnnnnnnnnnnnnnnnnnnnnnnnnnnnnnnnnnnnnnnnnnnnnnnnnnnnnnnnnnnnnnnnnnnnnnnnnnnnnnnnnnnnnnnnnnnnnnnnnnnnnnnnnnnnnnnnnnnnnnnnnnnnnnnnnnnnnnnnnnnnnnnnnnnnnnnnnnnnnnnnnnnnnnnnnnnnnnnnnnnnnnnnnnnnnnnnnnnnnnnnnnnnnnnnnnnnnnnnnnnnnnnnnnnnnnnnnnnnnnnnnnnnnnnnnnnnnnnnnnnnnnnnnnnnnnnnnnnnnnnnnnnnnnnnnnnnnnnnnnnnnnnnnnnnnnnnnnnnnnnnnnnnnnnnnnnnnnnnnnnnnnnnnnnnnnnnnnnnnnnnnnnnnnnnnnnnnnnnnnnnnnnnnnnnnnnnnnnnnnnnnnnnnnnnnnnnnnnnnnnnnnnnnnnnnnnnnnnnnnnnnnnnnnnnnnnnnnnnnnnnnnnnnnnnnnnnnnnnnnnnnnnnnnnnnnnnnnnnnnnnnnnnnnnnnnnnnnnnnnnnnnnnnnnnnnnnnnnnnnnnnnnnnnnnnnnnnnnnnnnnnnnnnnnnnnnnnnnnnnnnnnnnnnnnnnnnnnnnnnnnnnnnnnnnnnnnnnnnnnnnnnnnnnnnnnnnnnnnnnnnnnnnnnnnnnnnnnnnnnnnnnnnnnnnnnnnnnnnnnnnnnnnnnnnnnnnnnnnnnnnnnnnnnnnnnnnnnnnnnnnnnnnnnnnnnnnnnnnnnnnnnnnnnnnnnnnnnnnnnnnnnnnnnnnnnnnnnnnnnnnnnnnnnnnnnnnnnnnnnnnnnnnnnnnnnnnnnnnnnnnnnnnnnnnnnnnnnnnnnnnnnnnnnnnnnnnnnnnnnnnnnnnnnnnnnnnnnnnnnnnnnnnnnnnnnnnnnnnnnnnnnnnnnnnnnnnnnnnnnnnnnnnnnnnnnnnnnnnnnnnnnnnnnnnnnnnnnnnnnnnnnnnnnnnnnnnnnnnnnnnnnnnnnnnnnnnnnnnnnnnnnnnnnnnnnnnnnnnnnnnnnnnnnnnnnnnnnnnnnnnnnnnnnnnnnnnnnnnnnnnnnnnnnnnnnnnnnnnnnnnnnnnnnnnnnnnnnnnnnnnnnnnnnnnnnnnnnnnnnnnnnnnnnnnnnnnnnnnnnnnnnnnnnnnnnnnnnnnnnnnnnnnnnnnnnnnnnnnnnnnnnnnnnnnnnnnnnnnnnnnnnnnnnnnnnnnnnnnnnnnnnnnnnnnnnnnnnnnnnnnnnnnnnnnnnnnnnnnnnnnnnnnnnnnnnnnnnnnnnnnnnnnnnnnnnnnnnnnnnnnnnnnnnnnnnnnnnnnnnnnnnnnnnnnnnnnnnnnnnnnnnnnnnnnnnnnnnnnnnnnnnnnnnnnnnnnnnnnnnnnnnnnnnnnnnnnnnnnnnnnnnnnnnnnnnnnnnnnnnnnnnnnnnnnnnnnnnnnnnnnnnnnnnnnnnnnnnnnnnnnnnnnnnnnnnnnnnnnnnnnnnnnnnnnnnnnnnnnnnnnnnnnnnnnnnnnnnnnnnnnnnnnnnnnnnnnnnnnnnnnnnnnnnnnnnnnnnnnnnnnnnnnnnnnnnnnnnnnnnnnnnnnnnnnnnnnnnnnnnnnnnnnnnnnnnnnnnnnnnnnnnnnnnnnnnnnnnnnnnnnnnnnnnnnnnnnnnnnnnnnnnnnnnnnnnnnnnnnnnnnnnnnnnnnnnnnnnnnnnnnnnnnnnnnnnnnnnnnnnnnnnnnnnnnnnnnnnnnnnnnnnnnnnnnnnnnnnnnnnnnnnnnnnnnnnnnnnnnnnnnnnnnnnnnnnnnnnnnnnnnnnnnnnnnnnnnnnnnnnnnnnnnnnnnnnnnnnnnnnnnnnnnnnnnnnnnnnnnnnnnnnnnnnnnnnnnnnnnnnnnnnnnnnnnnnnnnnnnnnnnnnnnnnnnnnnnnnnnnnnnnnnnnnnnnnnnnnnnnnnnnnnnnnnnnnnnnnnnnnnnnnnnnnnnnnnnnnnnnnnnnnnnnnnnnnnnnnnnnnnnnnnnnnnnnnnnnnnnnnnnnnnnnnnnnnnnnnnnnnnnnnnnnnnnnnnnnnnnnnnnnnnnnnnnnnnnnnnnnnnnnnnnnnnnnnnnnnnnnnnnnnnnnnnnnnnnnnnnnnnnnnnnnnnnnnnnnnnnnnnnnnnnnnnnnnnnnnnnnnnnnnnnnnnnnnnnnnnnnnnnnnnnnnnnnnnnnnnnnnnnnnnnnnnnnnnnnnnnnnnnnnnnnnnnnnnnnnnnnnnnnnnnnnnnnnnnnnnnnnnnnnnnnnnnnnnnnnnnnnnnnnnnnnnnnnnnnnnnnnnnnnnnnnnnnnnnnnnnnnnnnnnnnnnnnnnnnnnnnnnnnnnnnnnnnnnnnnnnnnnnnnnnnnnnnnnnnnnnnnnnnnnnnnnnnnnnnnnnnnnnnnnnnnnnnnnnnnnnnnnnnnnnnnnnnnnnnnnnnnnnnnnnnnnnnnnnnnnnnnnnnnnnnnnnnnnnnnnnnnnnnnnnnnnnnnnnnnnnnnnnnnnnnnnnnnnnnnnnnnnnnnnnnnnnnnnnnnnnnnnnnnnnnnnnnnnnnnnnnnnnnnnnnnnnnnnnnnnnnnnnnnnnnnnnnnnnnnnnnnnnnnnnnnnnnnnnnnnnnnnnnnnnnnnnnnnnnnnnnnnnnnnnnnnnnnnnnnnnnnnnnnnnnnnnnnnnnnnnnnnnnnnnnnnnnnnnnnnnnnnnnnnnnnnnnnnnnnnnnnnnnnnnnnnnnnnnnnnnnnnnnnnnnnnnnnnnnnnnnnnnnnnnnnnnnnnnnnnnnnnnnnnnnnnnnnnnnnnnnnnnnnnnnnnnnnnnnnnnnnnnnnnnnnnnnnnnnnnnnnnnnnnnnnnnnnnnnnnnnnnnnnnnnnnnnnnnnnnnnnnnnnnnnnnnnnnnnnnnnnnnnnnnnnnnnnnnnnnnnnnnnnnnnnnnnnnnnnnnnnnnnnnnnnnnnnnnnnnnnnnnnnnnnnnnnnnnnnnnnnnnnnnnnnnnnnnnnnnnnnnnnnnnnnnnnnnnnnnnnnnnnnnnnnnnnnnnnnnnnnnnnnnnnnnnnnnnnnnnnnnnnnnnnnnnnnnnnnnnnnnnnnnnnnnnnnnnnnnnnnnnnnnnnnnnnnnnnnnnnnnnnnnnnnnnnnnnnnnnnnnnnnnnnnnnnnnnnnnnnnnnnnnnnnnnnnnnnnnnnnnnnnnnnnnnnnnnnnnnnnnnnnnnnnnnnnnnnnnnnnnnnnnnnnnnnnnnnnnnnnnnnnnnnnnnnnnnnnnnnnnnnnnnnnnnnnnnnnnnnnnnnnnnnnnnnnnnnnnnnnnnnnnnnnnnnnnnnnnnnnnnnnnnnnnnnnnnnnnnnnnnnnnnnnnnnnnnnnnnnnnnnnnnnnnnnnnnnnnnnnnnnnnnnnnnnnnnnnnnnnnnnnnnnnnnnnnnnnnnnnnnnnnnnnnnnnnnnnnnnnnnnnnnnnnnnnnnnnnnnnnnnnnnnnnnnnnnnnnnnnnnnnnnnnnnnnnnnnnnnnnnnnnnnnnnnnnnnnnnnnnnnnnnnnnnnnnnnnnnnnnnnnnnnnnnnnnnnnnnnnnnnnnnnnnnnnnnnnnnnnnnnnnnnnnnnnnnnnnnnnnnnnnnnnnnnnnnnnnnnnnnnnnnnnnnnnnnnnnnnnnnnnnnnnnnnnnnnnnnnnnnnnnnnnnnnnnnnnnnnnnnnnnnnnnnnnnnnnnnnnnnnnnnnnnnnnnnnnnnnnnnnnnnnnnnnnnnnnnnnnnnnnnnnnnnnnnnnnnnnnnnnnnnnnnnnnnnnnnnnnnnnnnnnnnnnnnnnnnnnnnnnnnnnnnnnnnnnnnnnnnnnnnnnnnnnnnnnnnnnnnnnnnnnnnnnnnnnnnnnnnnnnnnnnnnnnnnnnnnnnnnnnnnnnnnnnnnnnnnnnnnnnnnnnnnnnnnnnnnnnnnnnnnnnnnnnnnnnnnnnnnnnnnnnnnnnnnnnnnnnnnnnnnnnnnnnnnnnnnnnnnnnnnnnnnnnnnnnnnnnnnnnnnnnnnnnnnnnnnnnnnnnnnnnnnnnnnnnnnnnnnnnnnnnnnnnnnnnnnnnnnnnnnnnnnnnnnnnnnnnnnnnnnnnnnnnnnnnnnnnnnnnnnnnnnnnnnnnnnnnnnnnnnnnnnnnnnnnnnnnnnnnnnnnnnnnnnnnnnnnnnnnnnnnnnnnnnnnnnnnnnnnnnnnnnnnnnnnnnnnnnnnnnnnnnnnnnnnnnnnnnnnnnnnnnnnnnnnnnnnnnnnnnnnnnnnnnnnnnnnnnnnnnnnnnnnnnnnnnnnnnnnnnnnnnnnnnnnnnnnnnnnnnnnnnnnnnnnnnnnnnnnnnnnnnnnnnnnnnnnnnnnnnnnnnnnnnnnnnnnnnnnnnnnnnnnnnnnnnnnnnnnnnnnnnnnnnnnnnnnnnnnnnnnnnnnnnnnnnnnnnnnnnnnnnnnnnnnnnnnnnnnnnnnnnnnnnnnnnnnnnnnnnnnnnnnnnnnnnnnnnnnnnnnnnnnnnnnnnnnnnnnnnnnnnnnnnnnnnnnnnnnnnnnnnnnnnnnnnnnnnnnnnnnnnnnnnnnnnnnnnnnnnnnnnnnnnnnnnnnnnnnnnnnnnnnnnnnnnnnnnnnnnnnnnnnnnnnnnnnnnnnnnnnnnnnnnnnnnnnnnnnnnnnnnnnnnnnnnnnnnnnnnnnnnnnnnnnnnnnnnnnnnnnnnnnnnnnnnnnnnnnnnnnnnnnnnnnnnnnnnnnnnnnnnnnnnnnnnnnnnnnnnnnnnnnnnnnnnnnnnnnnnnnnnnnnnnnnnnnnnnnnnnnnnnnnnnnnnnnnnnnnnnnnnnnnnnnnnnnnnnnnnnnnnnnnnnnnnnnnnnnnnnnnnnnnnnnnnnnnnnnnnnnnnnnnnnnnnnnnnnnnnnnnnnnnnnnnnnnnnnnnnnnnnnnnnnnnnnnnnnnnnnnnnnnnnnnnnnnnnnnnnnnnnnnnnnnnnnnnnnnnnnnnnnnnnnnnnnnnnnnnnnnnnnnnnnnnnnnnnnnnnnnnnnnnnnnnnnnnnnnnnnnnnnnnnnnnnnnnnnnnnnnnnnnnnnnnnnnnnnnnnnnnnnnnnnnnnnnnnnnnnnnnnnnnnnnnnnnnnnnnnnnnnnnnnnnnnnnnnnnnnnnnnnnnnnnnnnnnnnnnnnnnnnnnnnnnnnnnnnnnnnnnnnnnnnnnnnnnnnnnnnnnnnnnnnnnnnnnnnnnnnnnnnnnnnnnnnnnnnnnnnnnnnnnnnnnnnnnnnnnnnnnnnnnnnnnnnnnnnnnnnnnnnnnnnnnnnnnnnnnnnnnnnnnnnnnnnnnnnnnnnnnnnnnnnnnnnnnnnnnnnnnnnnnnnnnnnnnnnnnnnnnnnnnnnnnnnnnnnnnnnnnnnnnnnnnnnnnnnnnnnnnnnnnnnnnnnnnnnnnnnnnnnnnnnnnnnnnnnnnnnnnnnnnnnnnnnnnnnnnnnnnnnnnnnnnnnnnnnnnnnnnnnnnnnnnnnnnnnnnnnnnnnnnnnnnnnnnnnnnnnnnnnnnnnnnnnnnnnnnnnnnnnnnnnnnnnnnnnnnnnnnnnnnnnnnnnnnnnnnnnnnnnnnnnnnnnnnnnnnnnnnnnnnnnnnnnnnnnnnnnnnnnnnnnnnnnnnnnnnnnnnnnnnnnnnnnnnnnnnnnnnnnnnnnnnnnnnnnnnnnnnnnnnnnnnnnnnnnnnnnnnnnnnnnnnnnnnnnnnnnnnnnnnnnnnnnnnnnnnnnnnnnnnnnnnnnnnnnnnnnnnnnnnnnnnnnnnnnnnnnnnnnnnnnnnnnnnnnnnnnnnnnnnnnnnnnnnnnnnnnnnnnnnnnnnnnnnnnnnnnnnnnnnnnnnnnnnnnnnnnnnnnnnnnnnnnnnnnnnnnnnnnnnnnnnnnnnnnnnnnnnnnnnnnnnnnnnnnnnnnnnnnnnnnnnnnnnnnnnnnnnnnnnnnnnnnnnnnnnnnnnnnnnnnnnnnnnnnnnnnnnnnnnnnnnnnnnnnnnnnnnnnnnnnnnnnnnnnnnnnnnnnnnnnnnnnnnnnnnnnnnnnnnnnnnnnnnnnnnnnnnnnnnnnnnnnnnnnnnnnnnnnnnnnnnnnnnnnnnnnnnnnnnnnnnnnnnnnnnnnnnnnnnnnnnnnnnnnnnnnnnnnnnnnnnnnnnnnnnnnnnnnnnnnnnnnnnnnnnnnnnnnnnnnnnnnnnnnnnnnnnnnnnnnnnnnnnnnnnnnnnnnnnnnnnnnnnnnnnnnnnnnnnnnnnnnnnnnnnnnnnnnnnnnnnnnnnnnnnnnnnnnnnnnnnnnnnnnnnnnnnnnnnnnnnnnnnnnnnnnnnnnnnnnnnnnnnnnnnnnnnnnnnnnnnnnnnnnnnnnnnnnnnnnnnnnnnnnnnnnnnnnnnnnnnnnnnnnnnnnnnnnnnnnnnnnnnnnnnnnnnnnnnnnnnnnnnnnnnnnnnnnnnnnnnnnnnnnnnnnnnnnnnnnnnnnnnnnnnnnnnnnnnnnnnnnnnnnnnnnnnnnnnnnnnnnnnnnnnnnnnnnnnnnnnnnnnnnnnnnnnnnnnnnnnnnnnnnnnnnnnnnnnnnnnnnnnnnnnnnnnnnnnnnnnnnnnnnnnnnnnnnnnnnnnnnnnnnnnnnnnnnnnnnnnnnnnnnnnnnnnnnnnnnnnnnnnnnnnnnnnnnnnnnnnnnnnnnnnnnnnnnnnnnnnnnnnnnnnnnnnnnnnnnnnnnnnnnnnnnnnnnnnnnnnnnnnnnnnnnnnnnnnnnnnnnnnnnnnnnnnnnnnnnnnnnnnnnnnnnnnnnnnnnnnnnnnnnnnnnnnnnnnnnnnnnnnnnnnnnnnnnnnnnnnnnnnnnnnnnnnnnnnnnnnnnnnnnnnnnnnnnnnnnnnnnnnnnnnnnnnnnnnnnnnnnnnnnnnnnnnnnnnnnnnnnnnnnnnnnnnnnnnnnnnnnnnnnnnnnnnnnnnnnnnnnnnnnnnnnnnnnnnnnnnnnnnnnnnnnnnnnnnnnnnnnnnnnnnnnnnnnnnnnnnnnnnnnnnnnnnnnnnnnnnnnnnnnnnnnnnnnnnnnnnnnnnnnnnnnnnnnnnnnnnnnnnnnnnnnnnnnnnnnnnnnnnnnnnnnnnnnnnnnnnnnnnnnnnnnnnnnnnnnnnnnnnnnnnnnnnnnnnnnnnnnnnnnnnnnnnnnnnnnnnnnnnnnnnnnnnnnnnnnnnnnnnnnnnnnnnnnnnnnnnnnnnnnnnnnnnnnnnnnnnnnnnnnnnnnnnnnnnnnnnnnnnnnnnnnnnnnnnnnnnnnnnnnnnnnnnnnnnnnnnnnnnnnnnnnnnnnnnnnnnnnnnnnnnnnnnnnnnnnnnnnnnnnnnnnnnnnnnnnnnnnnnnnnnnnnnnnnnnnnnnnnnnnnnnnnnnnnnnnnnnnnnnnnnnnnnnnnnnnnnnnnnnnnnnnnnnnnnnnnnnnnnnnnnnnnnnnnnnnnnnnnnnnnnnnnnnnnnnnnnnnnnnnnnnnnnnnnnnnnnnnnnnnnnnnnnnnnnnnnnnnnnnnnnnnnnnnnnnnnnnnnnnnnnnnnnnnnnnnnnnnnnnnnnnnnnnnnnnnnnnnnnnnnnnnnnnnnnnnnnnnnnnnnnnnnnnnnnnnnnnnnnnnnnnnnnnnnnnnnnnnnnnnnnnnnnnnnnnnnnnnnnnnnnnnnnnnnnnnnnnnnnnnnnnnnnnnnnnnnnnnnnnnnnnnnnnnnnnnnnnnnnnnnnnnnnnnnnnnnnnnnnnnnnnnnnnnnnnnnnnnnnnnnnnnnnnnnnnnnnnnnnnnnnnnnnnnnnnnnnnnnnnnnnnnnnnnnnnnnnnnnnnnnnnnnnnnnnnnnnnnnnnnnnnnnnnnnnnnnnnnnnnnnnnnnnnnnnnnnnnnnnnnnnnnnnnnnnnnnnnnnnnnnnnnnnnnnnnnnnnnnnnnnnnnnnnnnnnnnnnnnnnnnnnnnnnnnnnnnnnnnnnnnnnnnnnnnnnnnnnnnnnnnnnnnnnnnnnnnnnnnnnnnnnnnnnnnnnnnnnnnnnnnnnnnnnnnnnnnnnnnnnnnnnnnnnnnnnnnnnnnnnnnnnnnnnnnnnnnnnnnnnnnnnnnnnnnnnnnnnnnnnnnnnnnnnnnnnnnnnnnnnnnnnnnnnnnnnnnnnnnnnnnnnnnnnnnnnnnnnnnnnnnnnnnnnnnnnnnnnnnnnnnnnnnnnnnnnnnnnnnnnnnnnnnnnnnnnnnnnnnnnnnnnnnnnnnnnnnnnnnnnnnnnnnnnnnnnnnnnnnnnnnnnnnnnnnnnnnnnnnnnnnnnnnnnnnnnnnnnnnnnnnnnnnnnnnnnnnnnnnnnnnnnnnnnnnnnnnnnnnnnnnnnnnnnnnnnnnnnnnnnnnnnnnnnnnnnnnnnnnnnnnnnnnnnnnnnnnnnnnnnnnnnnnnnnnnnnnnnnnnnnnnnnnnnnnnnnnnnnnnnnnnnnnnnnnnnnnnnnnnnnnnnnnnnnnnnnnnnnnnnnnnnnnnnnnnnnnnnnnnnnnnnnnnnnnnnnnnnnnnnnnnnnnnnnnnnnnnnnnnnnnnnnnnnnnnnnnnnnnnnnnnnnnnnnnnnnnnnnnnnnnnnnnnnnnnnnnnnnnnnnnnnnnnnnnnnnnnnnnnnnnnnnnnnnnnnnnnnnnnnnnnnnnnnnnnnnnnnnnnnnnnnnnnnnnnnnnnnnnnnnnnnnnnnnnnnnnnnnnnnnnnnnnnnnnnnnnnnnnnnnnnnnnnnnnnnnnnnnnnnnnnnnnnnnnnnnnnnnnnnnnnnnnnnnnnnnnnnnnnnnnnnnnnnnnnnnnnnnnnnnnnnnnnnnnnnnnnnnnnnnnnnnnnnnnnnnnnnnnnnnnnnnnnnnnnnnnnnnnnnnnnnnnnnnnnnnnnnnnnnnnnnnnnnnnnnnnnnnnnnnnnnnnnnnnnnnnnnnnnnnnnnnnnnnnnnnnnnnnnnnnnnnnnnnnnnnnnnnnnnnnnnnnnnnnnnnnnnnnnnnnnnnnnnnnnnnnnnnnnnnnnnnnnnnnnnnnnnnnnnnnnnnnnnnnnnnnnnnnnnnnnnnnnnnnnnnnnnnnnnnnnnnnnnnnnnnnnnnnnnnnnnnnnnnnnnnnnnnnnnnnnnnnnnnnnnnnnnnnnnnnnnnnnnnnnnnnnnnnnnnnnnnnnnnnnnnnnnnnnnnnnnnnnnnnnnnnnnnnnnnnnnnnnnnnnnnnnnnnnnnnnnnnnnnnnnnnnnnnnnnnnnnnnnnnnnnnnnnnnnnnnnnnnnnnnnnnnnnnnnnnnnnnnnnnnnnnnnnnnnnnnnnnnnnnnnnnnnnnnnnnnnnnnnnnnnnnnnnnnnnnnnnnnnnnnnnnnnnnnnnnnnnnnnnnnnnnnnnnnnnnnnnnnnnnnnnnnnnnnnnnnnnnnnnnnnnnnnnnnnnnnnnnnnnnnnnnnnnnnnnnnnnnnnnnnnnnnnnnnnnnnnnnnnnnnnnnnnnnnnnnnnnnnnnnnnnnnnnnnnnnnnnnnnnnnnnnnnnnnnnnnnnnnnnnnnnnnnnnnnnnnnnnnnnnnnnnnnnnnnnnnnnnnnnnnnnnnnnnnnnnnnnnnnnnnnnnnnnnnnnnnnnnnnnnnnnnnnnnnnnnnnnnnnnnnnnnnnnnnnnnnnnnnnnnnnnnnnnnnnnnnnnnnnnnnnnnnnnnnnnnnnnnnnnnnnnnnnnnnnnnnnnnnnnnnnnnnnnnnnnnnnnnnnnnnnnnnnnnnnnnnnnnnnnnnnnnnnnnnnnnnnnnnnnnnnnnnnnnnnnnnnnnnnnnnnnnnnnnnnnnnnnnnnnnnnnnnnnnnnnnnnnnnnnnnnnnnnnnnnnnnnnnnnnnnnnnnnnnnnnnnnnnnnnnnnnnnnnnnnnnnnnnnnnnnnnnnnnnnnnnnnnnnnnnnnnnnnnnnnnnnnnnnnnnnnnnnnnnnnnnnnnnnnnnnnnnnnnnnnnnnnnnnnnnnnnnnnnnnnnnnnnnnnnnnnnnnnnnnnnnnnnnnnnnnnnnnnnnnnnnnnnnnnnnnnnnnnnnnnnnnnnnnnnnnnnnnnnnnnnnnnnnnnnnnnnnnnnnnnnnnnnnnnnnnnnnnnnnnnnnnnnnnnnnnnnnnnnnnnnnnnnnnnnnnnnnnnnnnnnnnnnnnnnnnnnnnnnnnnnnnnnnnnnnnnnnnnnnnnnnnnnnnnnnnnnnnnnnnnnnnnnnnnnnnnnnnnnnnnnnnnnnnnnnnnnnnnnnnnnnnnnnnnnnnnnnnnnnnnnnnnnnnnnnnnnnnnnnnnnnnnnnnnnnnnnnnnnnnnnnnnnnnnnnnnnnnnnnnnnnnnnnnnnnnnnnnnnnnnnnnnnnnnnnnnnnnnnnnnnnnnnnnnnnnnnnnnnnnnnnnnnnnnnnnnnnnnnnnnnnnnnnnnnnnnnnnnnnnnnnnnnnnnnnnnnnnnnnnnnnnnnnnnnnnnnnnnnnnnnnnnnnnnnnnnnnnnnnnnnnnnnnnnnnnnnnnnnnnnnnnnnnnnnnnnnnnnnnnnnnnnnnnnnnnnnnnnnnnnnnnnnnnnnnnnnnnnnnnnnnnnnnnnnnnnnnnnnnnnnnnnnnnnnnnnnnnnnnnnnnnnnnnnnnnnnnnnnnnnnnnnnnnnnnnnnnnnnnnnnnnnnnnnnnnnnnnnnnnnnnnnnnnnnnnnnnnnnnnnnnnnnnnnnnnnnnnnnnnnnnnnnnnnnnnnnnnnnnnnnnnnnnnnnnnnnnnnnnnnnnnnnnnnnnnnnnnnnnnnnnnnnnnnnnnnnnnnnnnnnnnnnnnnnnnnnnnnnnnnnnnnnnnnnnnnnnnnnnnnnnnnnnnnnnnnnnnnnnnnnnnnnnnnnnnnnnnnnnnnnnnnnnnnnnnnnnnnnnnnnnnnnnnnnnnnnnnnnnnnnnnnnnnnnnnnnnnnnnnnnnnnnnnnnnnnnnnnnnnnnnnnnnnnnnnnnnnnnnnnnnnnnnnnnnnnnnnnnnnnnnnnnnnnnnnnnnnnnnnnnnnnnnnnnnnnnnnnnnnnnnnnnnnnnnnnnnnnnnnnnnnnnnnnnnnnnnnnnnnnnnnnnnnnnnnnnnnnnnnnnnnnnnnnnnnnnnnnnnnnnnnnnnnnnnnnnnnnnnnnnnnnnnnnnnnnnnnnnnnnnnnnnnnnnnnnnnnnnnnnnnnnnnnnnnnnnnnnnnnnnnnnnnnnnnnnnnnnnnnnnnnnnnnnnnnnnnnnnnnnnnnnnnnnnnnnnnnnnnnnnnnnnnnnnnnnnnnnnnnnnnnnnnnnnnnnnnnnnnnnnnnnnnnnnnnnnnnnnnnnnnnnnnnnnnnnnnnnnnnnnnnnnnnnnnnnnnnnnnnnnnnnnnnnnnnnnnnnnnnnnnnnnnnnnnnnnnnnnnnnnnnnnnnnnnnnnnnnnnnnnnnnnnnnnnnnnnnnnnnnnnnnnnnnnnnnnnnnnnnnnnnnnnnnnnnnnnnnnnnnnnnnnnnnnnnnnnnnnnnnnnnnnnnnnnnnnnnnnnnnnnnnnnnnnnnnnnnnnnnnnnnnnnnnnnnnnnnnnnnnnnnnnnnnnnnnnnnnnnnnnnnnnnnnnnnnnnnnnnnnnnnnnnnnnnnnnnnnnnnnnnnnnnnnnnnnnnnnnnnnnnnnnnnnnnnnnnnnnnnnnnnnnnnnnnnnnnnnnnnnnnnnnnnnnnnnnnnnnnnnnnnnnnnnnnnnnnnnnnnnnnnnnnnnnnnnnnnnnnnnnnnnnnnnnnnnnnnnnnnnnnnnnnnnnnnnnnnnnnnnnnnnnnnnnnnnnnnnnnnnnnnnnnnnnnnnnnnnnnnnnnnnnnnnnnnnnnnnnnnnnnnnnnnnnnnnnnnnnnnnnnnnnnnnnnnnnnnnnnnnnnnnnnnnnnnnnnnnnnnnnnnnnnnnnnnnnnnnnnnnnnnnnnnnnnnnnnnnnnnnnnnnnnnnnnnnnnnnnnnnnnnnnnnnnnnnnnnnnnnnnnnnnnnnnnnnnnnnnnnnnnnnnnnnnnnnnnnnnnnnnnnnnnnnnnnnnnnnnnnnnnnnnnnnnnnnnnnnnnnnnnnnnnnnnnnnnnnnnnnnnnnnnnnnnnnnnnnnnnnnnnnnnnnnnnnnnnnnnnnnnnnnnnnnnnnnnnnnnnnnnnnnnnnnnnnnnnnnnnnnnnnnnnnnnnnnnnnnnnnnnnnnnnnnnnnnnnnnnnnnnnnnnnnnnnnnnnnnnnnnnnnnnnnnnnnnnnnnnnnnnnnnnnnnnnnnnnnnnnnnnnnnnnnnnnnnnnnnnnnnnnnnnnnnnnnnnnnnnnnnnnnnnnnnnnnnnnnnnnnnnnnnnnnnnnnnnnnnnnnnnnnnnnnnnnnnnnnnnnnnnnnnnnnnnnnnnnnnnnnnnnnnnnnnnnnnnnnnnnnnnnnnnnnnnnnnnnnnnnnnnnnnnnnnnnnnnnnnnnnnnnnnnnnnnnnnnnnnnnnnnnnnnnnnnnnnnnnnnnnnnnnnnnnnnnnnnnnnnnnnnnnnnnnnnnnnnnnnnnnnnnnnnnnnnnnnnnnnnnnnnnnnnnnnnnnnnnnnnnnnnnnnnnnnnnnnnnnnnnnnnnnnnnnnnnnnnnnnnnnnnnnnnnnnnnnnnnnnnnnnnnnnnnnnnnnnnnnnnnnnnnnnnnnnnnnnnnnnnnnnnnnnnnnnnnnnnnnnnnnnnnnnnnnnnnnnnnnnnnnnnnnnnnnnnnnnnnnnnnnnnnnnnnnnnnnnnnnnnnnnnnnnnnnnnnnnnnnnnnnnnnnnnnnnnnnnnnnnnnnnnnnnnnnnnnnnnnnnnnnnnnnnnnnnnnnnnnnnnnnnnnnnnnnnnnnnnnnnnnnnnnnnnnnnnnnnnnnnnnnnnnnnnnnnnnnnnnnnnnnnnnnnnnnnnnnnnnnnnnnnnnnnnnnnnnnnnnnnnnnnnnnnnnnnnnnnnnnnnnnnnnnnnnnnnnnnnnnnnnnnnnnnnnnnnnnnnnnnnnnnnnnnnnnnnnnnnnnnnnnnnnnnnnnnnnnnnnnnnnnnnnnnnnnnnnnnnnnnnnnnnnnnnnnnnnnnnnnnnnnnnnnnnnnnnnnnnnnnnnnnnnnnnnnnnnnnnnnnnnnnnnnnnnnnnnnnnnnnnnnnnnnnnnnnnnnnnnnnnnnnnnnnnnnnnnnnnnnnnnnnnnnnnnnnnnnnnnnnnnnnnnnnnnnnnnnnnnnnnnnnnnnnnnnnnnnnnnnnnnnnnnnnnnnnnnnnnnnnnnnnnnnnnnnnnnnnnnnnnnnnnnnnnnnnnnnnnnnnnnnnnnnnnnnnnnnnnnnnnnnnnnnnnnnnnnnnnnnnnnnnnnnnnnnnnnnnnnnnnnnnnnnnnnnnnnnnnnnnnnnnnnnnnnnnnnnnnnnnnnnnnnnnnnnnnnnnnnnnnnnnnnnnnnnnnnnnnnnnnnnnnnnnnnnnnnnnnnnnnnnnnnnnnnnnnnnnnnnnnnnnnnnnnnnnnnnnnnnnnnnnnnnnnnnnnnnnnnnnnnnnnnnnnnnnnnnnnnnnnnnnnnnnnnnnnnnnnnnnnnnnnnnnnnnnnnnnnnnnnnnnnnnnnnnnnnnnnnnnnnnnnnnnnnnnnnnnnnnnnnnnnnnnnnnnnnnnnnnnnnnnnnnnnnnnnnnnnnnnnnnnnnnnnnnnnnnnnnnnnnnnnnnnnnnnnnnnnnnnnnnnnnnnnnnnnnnnnnnnnnnnnnnnnnnnnnnnnnnnnnnnnnnnnnnnnnnnnnnnnnnnnnnnnnnnnnnnnnnnnnnnnnnnnnnnnnnnnnnnnnnnnnnnnnnnnnnnnnnnnnnnnnnnnnnnnnnnnnnnnnnnnnnnnnnnnnnnnnnnnnnnnnnnnnnnnnnnnnnnnnnnnnnnnnnnnnnnnnnnnnnnnnnnnnnnnnnnnnnnnnnnnnnnnnnnnnnnnnnnnnnnnnnnnnnnnnnnnnnnnnnnnnnnnnnnnnnnnnnnnnnnnnnnnnnnnnnnnnnnnnnnnnnnnnnnnnnnnnnnnnnnnnnnnnnnnnnnnnnnnnnnnnnnnnnnnnnnnnnnnnnnnnnnnnnnnnnnnnnnnnnnnnnnnnnnnnnnnnnnnnnnnnnnnnnnnnnnnnnnnnnnnnnnnnnnnnnnnnnnnnnnnnnnnnnnnnnnnnnnnnnnnnnnnnnnnnnnnnnnnnnnnnnnnnnnnnnnnnnnnnnnnnnnnnnnnnnnnnnnnnnnnnnnnnnnnnnnnnnnnnnnnnnnnnnnnnnnnnnnnnnnnnnnnnnnnnnnnnnnnnnnnnnnnnnnnnnnnnnnnnnnnnnnnnnnnnnnnnnnnnnnnnnnnnnnnnnnnnnnnnnnnnnnnnnnnnnnnnnnnnnnnnnnnnnnnnnnnnnnnnnnnnnnnnnnnnnnnnnnnnnnnnnnnnnnnnnnnnnnnnnnnnnnnnnnnnnnnnnnnnnnnnnnnnnnnnnnnnnnnnnnnnnnnnnnnnnnnnnnnnnnnnnnnnnnnnnnnnnnnnnnnnnnnnnnnnnnnnnnnnnnnnnnnnnnnnnnnnnnnnnnnnnnnnnnnnnnnnnnnnnnnnnnnnnnnnnnnnnnnnnnnnnnnnnnnnnnnnnnnnnnnnnnnnnnnnnnnnnnnnnnnnnnnnnnnnnnnnnnnnnnnnnnnnnnnnnnnnnnnnnnnnnnnnnnnnnnnnnnnnnnnnnnnnnnnnnnnnnnnnnnnnnnnnnnnnnnnnnnnnnnnnnnnnnnnnnnnnnnnnnnnnnnnnnnnnnnnnnnnnnnnnnnnnnnnnnnnnnnnnnnnnnnnnnnnnnnnnnnnnnnnnnnnnnnnnnnnnnnnnnnnnnnnnnnnnnnnnnnnnnnnnnnnnnnnnnnnnnnnnnnnnnnnnnnnnnnnnnnnnnnnnnnnnnnnnnnnnnnnnnnnnnnnnnnnnnnnnnnnnnnnnnnnnnnnnnnnnnnnnnnnnnnnnnnnnnnnnnnnnnnnnnnnnnnnnnnnnnnnnnnnnnnnnnnnnnnnnnnnnnnnnnnnnnnnnnnnnnnnnnnnnnnnnnnnnnnnnnnnnnnnnnnnnnnnnnnnnnnnnnnnnnnnnnnnnnnnnnnnnnnnnnnnnnnnnnnnnnnnnnnnnnnnnnnnnnnnnnnnnnnnnnnnnnnnnnnnnnnnnnnnnnnnnnnnnnnnnnnnnnnnnnnnnnnnnnnnnnnnnnnnnnnnnnnnnnnnnnnnnnnnnnnnnnnnnnnnnnnnnnnnnnnnnnnnnnnnnnnnnnnnnnnnnnnnnnnnnnnnnnnnnnnnnnnnnnnnnnnnnnnnnnnnnnnnnnnnnnnnnnnnnnnnnnnnnnnnnnnnnnnnnnnnnnnnnnnnnnnnnnnnnnnnnnnnnnnnnnnnnnnnnnnnnnnnnnnnnnnnnnnnnnnnnnnnnnnnnnnnnnnnnnnnnnnnnnnnnnnnnnnnnnnnnnnnnnnnnnnnnnnnnnnnnnnnnnnnnnnnnnnnnnnnnnnnnnnnnnnnnnnnnnnnnnnnnnnnnnnnnnnnnnnnnnnnnnnnnnnnnnnnnnnnnnnnnnnnnnnnnnnnnnnnnnnnnnnnnnnnnnnnnnnnnnnnnnnnnnnnnnnnnnnnnnnnnnnnnnnnnnnnnnnnnnnnnnnnnnnnnnnnnnnnnnnnnnnnnnnnnnnnnnnnnnnnnnnnnnnnnnnnnnnnnnnnnnnnnnnnnnnnnnnnnnnnnnnnnnnnnnnnnnnnnnnnnnnnnnnnnnnnnnnnnnnnnnnnnnnnnnnnnnnnnnnnnnnnnnnnnnnnnnnnnnnnnnnnnnnnnnnnnnnnnnnnnnnnnnnnnnnnnnnnnnnnnnnnnnnnnnnnnnnnnnnnnnnnnnnnnnnnnnnnnnnnnnnnnnnnnnnnnnnnnnnnnnnnnnnnnnnnnnnnnnnnnnnnnnnnnnnnnnnnnnnnnnnnnnnnnnnnnnnnnnnnnnnnnnnnnnnnnnnnnnnnnnnnnnnnnnnnnnnnnnnnnnnnnnnnnnnnnnnnnnnnnnnnnnnnnnnnnnnnnnnnnnnnnnnnnnnnnnnnnnnnnnnnnnnnnnnnnnnnnnnnnnnnnnnnnnnnnnnnnnnnnnnnnnnnnnnnnnnnnnnnnnnnnnnnnnnnnnnnnnnnnnnnnnnnnnnnnnnnnnnnnnnnnnnnnnnnnnnnnnnnnnnnnnnnnnnnnnnnnnnnnnnnnnnnnnnnnnnnnnnnnnnnnnnnnnnnnnnnnnnnnnnnnnnnnnnnnnnnnnnnnnnnnnnnnnnnnnnnnnnnnnnnnnnnnnnnnnnnnnnnnnnnnnnnnnnnnnnnnnnnnnnnnnnnnnnnnnnnnnnnnnnnnnnnnnnnnnnnnnnnnnnnnnnnnnnnnnnnnnnnnnnnnnnnnnnnnnnnnnnnnnnnnnnnnnnnnnnnnnnnnnnnnnnnnnnnnnnnnnnnnnnnnnnnnnnnnnnnnnnnnnnnnnnnnnnnnnnnnnnnnnnnnnnnnnnnnnnnnnnnnnnnnnnnnnnnnnnnnnnnnnnnnnnnnnnnnnnnnnnnnnnnnnnnnnnnnnnnnnnnnnnnnnnnnnnnnnnnnnnnnnnnnnnnnnnnnnnnnnnnnnnnnnnnnnnnnnnnnnnnnnnnnnnnnnnnnnnnnnnnnnnnnnnnnnnnnnnnnnnnnnnnnnnnnnnnnnnnnnnnnnnnnnnnnnnnnnnnnnnnnnnnnnnnnnnnnnnnnnnnnnnnnnnnnnnnnnnnnnnnnnnnnnnnnnnnnnnnnnnnnnnnnnnnnnnnnnnnnnnnnnnnnnnnnnnnnnnnnnnnnnnnnnnnnnnnnnnnnnnnnnnnnnnnnnnnnnnnnnnnnnnnnnnnnnnnnnnnnnnnnnnnnnnnnnnnnnnnnnnnnnnnnnnnnnnnnnnnnnnnnnnnnnnnnnnnnnnnnnnnnnnnnnnnnnnnnnnnnnnnnnnnnnnnnnnnnnnnnnnnnnnnnnnnnnnnnnnnnnnnnnnnnnnnnnnnnnnnnnnnnnnnnnnnnnnnnnnnnnnnnnnnnnnnnnnnnnnnnnnnnnnnnnnnnnnnnnnnnnnnnnnnnnnnnnnnnnnnnnnnnnnnnnnnnnnnnnnnnnnnnnnnnnnnnnnnnnnnnnnnnnnnnnnnnnnnnnnnnnnnnnnnnnnnnnnnnnnnnnnnnnnnnnnnnnnnnnnnnnnnnnnnnnnnnnnnnnnnnnnnnnnnnnnnnnnnnnnnnnnnnnnnnnnnnnnnnnnnnnnnnnnnnnnnnnnnnnnnnnnnnnnnnnnnnnnnnnnnnnnnnnnnnnnnnnnnnnnnnnnnnnnnnnnnnnnnnnnnnnnnnnnnnnnnnnnnnnnnnnnnnnnnnnnnnnnnnnnnnnnnnnnnnnnnnnnnnnnnnnnnnnnnnnnnnnnnnnnnnnnnnnnnnnnnnnnnnnnnnnnnnnnnnnnnnnnnnnnnnnnnnnnnnnnnnnnnnnnnnnnnnnnnnnnnnnnnnnnnnnnnnnnnnnnnnnnnnnnnnnnnnnnnnnnnnnnnnnnnnnnnnnnnnnnnnnnnnnnnnnnnnnnnnnnnnnnnnnnnnnnnnnnnnnnnnnnnnnnnnnnnnnnnnnnnnnnnnnnnnnnnnnnnnnnnnnnnnnnnnnnnnnnnnnnnnnnnnnnnnnnnnnnnnnnnnnnnnnnnnnnnnnnnnnnnnnnnnnnnnnnnnnnnnnnnnnnnnnnnnnnnnnnnnnnnnnnnnnnnnnnnnnnnnnnnnnnnnnnnnnnnnnnnnnnnnnnnnnnnnnnnnnnnnnnnnnnnnnnnnnnnnnnnnnnnnnnnnnnnnnnnnnnnnnnnnnnnnnnnnnnnnnnnnnnnnnnnnnnnnnnnnnnnnnnnnnnnnnnnnnnnnnnnnnnnnnnnnnnnnnnnnnnnnnnnnnnnnnnnnnnnnnnnnnnnnnnnnnnnnnnnnnnnnnnnnnnnnnnnnnnnnnnnnnnnnnnnnnnnnnnnnnnnnnnnnnnnnnnnnnnnnnnnnnnnnnnnnnnnnnnnnnnnnnnnnnnnnnnnnnnnnnnnnnnnnnnnnnnnnnnnnnnnnnnnnnnnnnnnnnnnnnnnnnnnnnnnnnnnnnnnnnnnnnnnnnnnnnnnnnnnnnnnnnnnnnnnnnnnnnnnnnnnnnnnnnnnnnnnnnnnnnnnnnnnnnnnnnnnnnnnnnnnnnnnnnnnnnnnnnnnnnnnnnnnnnnnnnnnnnnnnnnnnnnnnnnnnnnnnnnnnnnnnnnnnnnnnnnnnnnnnnnnnnnnnnnnnnnnnnnnnnnnnnnnnnnnnnnnnnnnnnnnnnnnnnnnnnnnnnnnnnnnnnnnnnnnnnnnnnnnnnnnnnnnnnnnnnnnnnnnnnnnnnnnnnnnnnnnnnnnnnnnnnnnnnnnnnnnnnnnnnnnnnnnnnnnnnnnnnnnnnnnnnnnnnnnnnnnnnnnnnnnnnnnnnnnnnnnnnnnnnnnnnnnnnnnnnnnnnnnnnnnnnnnnnnnnnnnnnnnnnnnnnnnnnnnnnnnnnnnnnnnnnnnnnnnnnnnnnnnnnnnnnnnnnnnnnnnnnnnnnnnnnnnnnnnnnnnnnnnnnnnnnnnnnnnnnnnnnnnnnnnnnnnnnnnnnnnnnnnnnnnnnnnnnnnnnnnnnnnnnnnnnnnnnnnnnnnnnnnnnnnnnnnnnnnnnnnnnnnnnnnnnnnnnnnnnnnnnnnnnnnnnnnnnnnnnnnnnnnnnnnnnnnnnnnnnnnnnnnnnnnnnnnnnnnnnnnnnnnnnnnnnnnnnnnnnnnnnnnnnnnnnnnnnnnnnnnnnnnnnnnnnnnnnnnnnnnnnnnnnnnnnnnnnnnnnnnnnnnnnnnnnnnnnnnnnnnnnnnnnnnnnnnnnnnnnnnnnnnnnnnnnnnnnnnnnnnnnnnnnnnnnnnnnnnnnnnnnnnnnnnnnnnnnnnnnnnnnnnnnnnnnnnnnnnnnnnnnnnnnnnnnnnnnnnnnnnnnnnnnnnnnnnnnnnnnnnnnnnnnnnnnnnnnnnnnnnnnnnnnnnnnnnnnnnnnnnnnnnnnnnnnnnnnnnnnnnnnnnnnnnnnnnnnnnnnnnnnnnnnnnnnnnnnnnnnnnnnnnnnnnnnnnnnnnnnnnnnnnnnnnnnnnnnnnnnnnnnnnnnnnnnnnnnnnnnnnnnnnnnnnnnnnnnnnnnnnnnnnnnnnnnnnnnnnnnnnnnnnnnnnnnnnnnnnnnnnnnnnnnnnnnnnnnnnnnnnnnnnnnnnnnnnnnnnnnnnnnnnnnnnnnnnnnnnnnnnnnnnnnnnnnnnnnnnnnnnnnnnnnnnnnnnnnnnnnnnnnnnnnnnnnnnnnnnnnnnnnnnnnnnnnnnnnnnnnnnnnnnnnnnnnnnnnnnnnnnnnnnnnnnnnnnnnnnnnnnnnnnnnnnnnnnnnnnnnnnnnnnnnnnnnnnnnnnnnnnnnnnnnnnnnnnnnnnnnnnnnnnnnnnnnnnnnnnnnnnnnnnnnnnnnnnnnnnnnnnnnnnnnnnnnnnnnnnnnnnnnnnnnnnnnnnnnnnnnnnnnnnnnnnnnnnnnnnnnnnnnnnnnnnnnnnnnnnnnnnnnnnnnnnnnnnnnnnnnnnnnnnnnnnnnnnnnnnnnnnnnnnnnnnnnnnnnnnnnnnnnnnnnnnnnnnnnnnnnnnnnnnnnnnnnnnnnnnnnnnnnnnnnnnnnnnnnnnnnnnnnnnnnnnnnnnnnnnnnnnnnnnnnnnnnnnnnnnnnnnnnnnnnnnnnnnnnnnnnnnnnnnnnnnnnnnnnnnnnnnnnnnnnnnnnnnnnnnnnnnnnnnnnnnnnnnnnnnnnnnnnnnnnnnnnnnnnnnnnnnnnnnnnnnnnnnnnnnnnnnnnnnnnnnnnnnnnnnnnnnnnnnnnnnnnnnnnnnnnnnnnnnnnnnnnnnnnnnnnnnnnnnnnnnnnnnnnnnnnnnnnnnnnnnnnnnnnnnnnnnnnnnnnnnnnnnnnnnnnnnnnnnnnnnnnnnnnnnnnnnnnnnnnnnnnnnnnnnnnnnnnnnnnnnnnnnnnnnnnnnnnnnnnnnnnnnnnnnnnnnnnnnnnnnnnnnnnnnnnnnnnnnnnnnnnnnnnnnnnnnnnnnnnnnnnnnnnnnnnnnnnnnnnnnnnnnnnnnnnnnnnnnnnnnnnnnnnnnnnnnnnnnnnnnnnnnnnnnnnnnnnnnnnnnnnnnnnnnnnnnnnnnnnnnnnnnnnnnnnnnnnnnnnnnnnnnnnnnnnnnnnnnnnnnnnnnnnnnnnnnnnnnnnnnnnnnnnnnnnnnnnnnnnnnnnnnnnnnnnnnnnnnnnnnnnnnnnnnnnnnnnnnnnnnnnnnnnnnnnnnnnnnnnnnnnnnnnnnnnnnnnnnnnnnnnnnnnnnnnnnnnnnnnnnnnnnnnnnnnnnnnnnnnnnnnnnnnnnnnnnnnnnnnnnnnnnnnnnnnnnnnnnnnnnnnnnnnnnnnnnnnnnnnnnnnnnnnnnnnnnnnnnnnnnnnnnnnnnnnnnnnnnnnnnnnnnnnnnnnnnnnnnnnnnnnnnnnnnnnnnnnnnnnnnnnnnnnnnnnnnnnnnnnnnnnnnnnnnnnnnnnnnnnnnnnnnnnnnnnnnnnnnnnnnnnnnnnnnnnnnnnnnnnnnnnnnnnnnnnnnnnnnnnnnnnnnnnnnnnnnnnnnnnnnnnnnnnnnnnnnnnnnnnnnnnnnnnnnnnnnnnnnnnnnnnnnnnnnnnnnnnnnnnnnnnnnnnnnnnnnnnnnnnnnnnnnnnnnnnnnnnnnnnnnnnnnnnnnnnnnnnnnnnnnnnnnnnnnnnnnnnnnnnnnnnnnnnnnnnnnnnnnnnnnnnnnnnnnnnnnnnnnnnnnnnnnnnnnnnnnnnnnnnnnnnnnnnnnnnnnnnnnnnnnnnnnnnnnnnnnnnnnnnnnnnnnnnnnnnnnnnnnnnnnnnnnnnnnnnnnnnnnnnnnnnnnnnnnnnnnnnnnnnnnnnnnnnnnnnnnnnnnnnnnnnnnnnnnnnnnnnnnnnnnnnnnnnnnnnnnnnnnnnnnnnnnnnnnnnnnnnnnnnnnnnnnnnnnnnnnnnnnnnnnnnnnnnnnnnnnnnnnnnnnnnnnnnnnnnnnnnnnnnnnnnnnnnnnnnnnnnnnnnnnnnnnnnnnnnnnnnnnnnnnnnnnnnnnnnnnnnnnnnnnnnnnnnnnnnnnnnnnnnnnnnnnnnnnnnnnnnnnnnnnnnnnnnnnnnnnnnnnnnnnnnnnnnnnnnnnnnnnnnnnnnnnnnnnnnnnnnnnnnnnnnnnnnnnnnnnnnnnnnnnnnnnnnnnnnnnnnnnnnnnnnnnnnnnnnnnnnnnnnnnnnnnnnnnnnnnnnnnnnnnnnnnnnnnnnnnnnnnnnnnnnnnnnnnnnnnnnnnnnnnnnnnnnnnnnnnnnnnnnnnnnnnnnnnnnnnnnnnnnnnnnnnnnnnnnnnnnnnnnnnnnnnnnnnnnnnnnnnnnnnnnnnnnnnnnnnnnnnnnnnnnnnnnnnnnnnnnnnnnnnnnnnnnnnnnnnnnnnnnnnnnnnnnnnnnnnnnnnnnnnnnnnnnnnnnnnnnnnnnnnnnnnnnnnnnnnnnnnnnnnnnnnnnnnnnnnnnnnnnnnnnnnnnnnnnnnnnnnnnnnnnnnnnnnnnnnnnnnnnnnnnnnnnnnnnnnnnnnnnnnnnnnnnnnnnnnnnnnnnnnnnnnnnnnnnnnnnnnnnnnnnnnnnnnnnnnnnnnnnnnnnnnnnnnnnnnnnnnnnnnnnnnnnnnnnnnnnnnnnnnnnnnnnnnnnnnnnnnnnnnnnnnnnnnnnnnnnnnnnnnnnnnnnnnnnnnnnnnnnnnnnnnnnnnnnnnnnnnnnnnnnnnnnnnnnnnnnnnnnnnnnnnnnnnnnnnnnnnnnnnnnnnnnnnnnnnnnnnnnnnnnnnnnnnnnnnnnnnnnnnnnnnnnnnnnnnnnnnnnnnnnnnnnnnnnnnnnnnnnnnnnnnnnnnnnnnnnnnnnnnnnnnnnnnnnnnnnnnnnnnnnnnnnnnnnnnnnnnnnnnnnnnnnnnnnnnnnnnnnnnnnnnnnnnnnnnnnnnnnnnnnnnnnnnnnnnnnnnnnnnnnnnnnnnnnnnnnnnnnnnnnnnnnnnnnnnnnnnnnnnnnnnnnnnnnnnnnnnnnnnnnnnnnnnnnnnnnnnnnnnnnnnnnnnnnnnnnnnnnnnnnnnnnnnnnnnnnnnnnnnnnnnnnnnnnnnnnnnnnnnnnnnnnnnnnnnnnnnnnnnnnnnnnnnnnnnnnnnnnnnnnnnnnnnnnnnnnnnnnnnnnnnnnnnnnnnnnnnnnnnnnnnnnnnnnnnnnnnnnnnnnnnnnnnnnnnnnnnnnnnnnnnnnnnnnnnnnnnnnnnnnnnnnnnnnnnnnnnnnnnnnnnnnnnnnnnnnnnnnnnnnnnnnnnnnnnnnnnnnnnnnnnnnnnnnnnnnnnnnnnnnnnnnnnnnnnnnnnnnnnnnnnnnnnnnnnnnnnnnnnnnnnnnnnnnnnnnnnnnnnnnnnnnnnnnnnnnnnnnnnnnnnnnnnnnnnnnnnnnnnnnnnnnnnnnnnnnnnnnnnnnnnnnnnnnnnnnnnnnnnnnnnnnnnnnnnnnnnnnnnnnnnnnnnnnnnnnnnnnnnnnnnnnnnnnnnnnnnnnnnnnnnnnnnnnnnnnnnnnnnnnnnnnnnnnnnnnnnnnnnnnnnnnnnnnnnnnnnnnnnnnnnnnnnnnnnnnnnnnnnnnnnnnnnnnnnnnnnnnnnnnnnnnnnnnnnnnnnnnnnnnnnnnnnnnnnnnnnnnnnnnnnnnnnnnnnnnnnnnnnnnnnnnnnnnnnnnnnnnnnnnnnnnnnnnnnnnnnnnnnnnnnnnnnnnnnnnnnnnnnnnnnnnnnnnnnnnnnnnnnnnnnnnnnnnnnnnnnnnnnnnnnnnnnnnnnnnnnnnnnnnnnnnnnnnnnnnnnnnnnnnnnnnnnnnnnnnnnnnnnnnnnnnnnnnnnnnnnnnnnnnnnnnnnnnnnnnnnnnnnnnnnnnnnnnnnnnnnnnnnnnnnnnnnnnnnnnnnnnnnnnnnnnnnnnnnnnnnnnnnnnnnnnnnnnnnnnnnnnnnnnnnnnnnnnnnnnnnnnnnnnnnnnnnnnnnnnnnnnnnnnnnnnnnnnnnnnnnnnnnnnnnnnnnnnnnnnnnnnnnnnnnnnnnnnnnnnnnnnnnnnnnnnnnnnnnnnnnnnnnnnnnnnnnnnnnnnnnnnnnnnnnnnnnnnnnnnnnnnnnnnnnnnnnnnnnnnnnnnnnnnnnnnnnnnnnnnnnnnnnnnnnnnnnnnnnnnnnnnnnnnnnnnnnnnnnnnnnnnnnnnnnnnnnnnnnnnnnnnnnnnnnnnnnnnnnnnnnnnnnnnnnnnnnnnnnnnnnnnnnnnnnnnnnnnnnnnnnnnnnnnnnnnnnnnnnnnnnnnnnnnnnnnnnnnnnnnnnnnnnnnnnnnnnnnnnnnnnnnnnnnnnnnnnnnnnnnnnnnnnnnnnnnnnnnnnnnnnnnnnnnnnnnnnnnnnnnnnnnnnnnnnnnnnnnnnnnnnnnnnnnnnnnnnnnnnnnnnnnnnnnnnnnnnnnnnnnnnnnnnnnnnnnnnnnnnnnnnnnnnnnnnnnnnnnnnnnnnnnnnnnnnnnnnnnnnnnnnnnnnnnnnnnnnnnnnnnnnnnnnnnnnnnnnnnnnnnnnnnnnnnnnnnnnnnnnnnnnnnnnnnnnnnnnnnnnnnnnnnnnnnnnnnnnnnnnnnnnnnnnnnnnnnnnnnnnnnnnnnnnnnnnnnnnnnnnnnnnnnnnnnnnnnnnnnnnnnnnnnnnnnnnnnnnnnnnnnnnnnnnnnnnnnnnnnnnnnnnnnnnnnnnnnnnnnnnnnnnnnnnnnnnnnnnnnnnnnnnnnnnnnnnnnnnnnnnnnnnnnnnnnnnnnnnnnnnnnnnnnnnnnnnnnnnnnnnnnnnnnnnnnnnnnnnnnnnnnnnnnnnnnnnnnnnnnnnnnnnnnnnnnnnnnnnnnnnnnnnnnnnnnnnnnnnnnnnnnnnnnnnnnnnnnnnnnnnnnnnnnnnnnnnnnnnnnnnnnnnnnnnnnnnnnnnnnnnnnnnnnnnnnnnnnnnnnnnnnnnnnnnnnnnnnnnnnnnnnnnnnnnnnnnnnnnnnnnnnnnnnnnnnnnnnnnnnnnnnnnnnnnnnnnnnnnnnnnnnnnnnnnnnnnnnnnnnnnnnnnnnnnnnnnnnnnnnnnnnnnnnnnnnnnnnnnnnnnnnnnnnnnnnnnnnnnnnnnnnnnnnnnnnnnnnnnnnnnnnnnnnnnnnnnnnnnnnnnnnnnnnnnnnnnnnnnnnnnnnnnnnnnnnnnnnnnnnnnnnnnnnnnnnnnnnnnnnnnnnnnnnnnnnnnnnnnnnnnnnnnnnnnnnnnnnnnnnnnnnnnnnnnnnnnnnnnnnnnnnnnnnnnnnnnnnnnnnnnnnnnnnnnnnnnnnnnnnnnnnnnnnnnnnnnnnnnnnnnnnnnnnnnnnnnnnnnnnnnnnnnnnnnnnnnnnnnnnnnnnnnnnnnnnnnnnnnnnnnnnnnnnnnnnnnnnnnnnnnnnnnnnnnnnnnnnnnnnnnnnnnnnnnnnnnnnnnnnnnnnnnnnnnnnnnnnnnnnnnnnnnnnnnnnnnnnnnnnnnnnnnnnnnnnnnnnnnnnnnnnnnnnnnnnnnnnnnnnnnnnnnnnnnnnnnnnnnnnnnnnnnnnnnnnnnnnnnnnnnnnnnnnnnnnnnnnnnnnnnnnnnnnnnnnnnnnnnnnnnnnnnnnnnnnnnnnnnnnnnnnnnnnnnnnnnnnnnnnnnnnnnnnnnnnnnnnnnnnnnnnnnnnnnnnnnnnnnnnnnnnnnnnnnnnnnnnnnnnnnnnnnnnnnnnnnnnnnnnnnnnnnnnnnnnnnnnnnnnnnnnnnnnnnnnnnnnnnnnnnnnnnnnnnnnnnnnnnnnnnnnnnnnnnnnnnnnnnnnnnnnnnnnnnnnnnnnnnnnnnnnnnnnnnnnnnnnnnnnnnnnnnnnnnnnnnnnnnnnnnnnnnnnnnnnnnnnnnnnnnnnnnnnnnnnnnnnnnnnnnnnnnnnnnnnnnnnnnnnnnnnnnnnnnnnnnnnnnnnnnnnnnnnnnnnnnnnnnnnnnnnnnnnnnnnnnnnnnnnnnnnnnnnnnnnnnnnnnnnnnnnnnnnnnnnnnnnnnnnnnnnnnnnnnnnnnnnnnnnnnnnnnnnnnnnnnnnnnnnnnnnnnnnnnnnnnnnnnnnnnnnnnnnnnnnnnnnnnnnnnnnnnnnnnnnnnnnnnnnnnnnnnnnnnnnnnnnnnnnnnnnnnnnnnnnnnnnnnnnnnnnnnnnnnnnnnnnnnnnnnnnnnnnnnnnnnnnnnnnnnnnnnnnnnnnnnnnnnnnnnnnnnnnnnnnnnnnnnnnnnnnnnnnnnnnnnnnnnnnnnnnnnnnnnnnnnnnnnnnnnnnnnnnnnnnnnnnnnnnnnnnnnnnnnnnnnnnnnnnnnnnnnnnnnnnnnnnnnnnnnnnnnnnnnnnnnnnnnnnnnnnnnnnnnnnnnnnnnnnnnnnnnnnnnnnnnnnnnnnnnnnnnnnnnnnnnnnnnnnnnnnnnnnnnnnnnnnnnnnnnnnnnnnnnnnnnnnnnnnnnnnnnnnnnnnnnnnnnnnnnnnnnnnnnnnnnnnnnnnnnnnnnnnnnnnnnnnnnnnnnnnnnnnnnnnnnnnnnnnnnnnnnnnnnnnnnnnnnnnnnnnnnnnnnnnnnnnnnnnnnnnnnnnnnnnnnnnnnnnnnnnnnnnnnnnnnnnnnnnnnnnnnnnnnnnnnnnnnnnnnnnnnnnnnnnnnnnnnnnnnnnnnnnnnnnnnnnnnnnnnnnnnnnnnnnnnnnnnnnnnnnnnnnnnnnnnnnnnnnnnnnnnnnnnnnnnnnnnnnnnnnnnnnnnnnnnnnnnnnnnnnnnnnnnnnnnnnnnnnnnnnnnnnnnnnnnnnnnnnnnnnnnnnnnnnnnnnnnnnnnnnnnnnnnnnnnnnnnnnnnnnnnnnnnnnnnnnnnnnnnnnnnnnnnnnnnnnnnnnnnnnnnnnnnnnnnnnnnnnnnnnnnnnnnnnnnnnnnnnnnnnnnnnnnnnnnnnnnnnnnnnnnnnnnnnnnnnnnnnnnnnnnnnnnnnnnnnnnnnnnnnnnnnnnnnnnnnnnnnnnnnnnnnnnnnnnnnnnnnnnnnnnnnnnnnnnnnnnnnnnnnnnnnnnnnnnnnnnnnnnnnnnnnnnnnnnnnnnnnnnnnnnnnnnnnnnnnnnnnnnnnnnnnnnnnnnnnnnnnnnnnnnnnnnnnnnnnnnnnnnnnnnnnnnnnnnnnnnnnnnnnnnnnnnnnnnnnnnnnnnnnnnnnnnnnnnnnnnnnnnnnnnnnnnnnnnnnnnnnnnnnnnnnnnnnnnnnnnnnnnnnnnnnnnnnnnnnnnnnnnnnnnnnnnnnnnnnnnnnnnnnnnnnnnnnnnnnnnnnnnnnnnnnnnnnnnnnnnnnnnnnnnnnnnnnnnnnnnnnnnnnnnnnnnnnnnnnnnnnnnnnnnnnnnnnnnnnnnnnnnnnnnnnnnnnnnnnnnnnnnnnnnnnnnnnnnnnnnnnnnnnnnnnnnnnnnnnnnnnnnnnnnnnnnnnnnnnnnnnnnnnnnnnnnnnnnnnnnnnnnnnnnnnnnnnnnnnnnnnnnnnnnnnnnnnnnnnnnnnnnnnnnnnnnnnnnnnnnnnnnnnnnnnnnnnnnnnnnnnnnnnnnnnnnnnnnnnnnnnnnnnnnnnnnnnnnnnnnnnnnnnnnnnnnnnnnnnnnnnnnnnnnnnnnnnnnnnnnnnnnnnnnnnnnnnnnnnnnnnnnnnnnnnnnnnnnnnnnnnnnnnnnnnnnnnnnnnnnnnnnnnnnnnnnnnnnnnnnnnnnnnnnnnnnnnnnnnnnnnnnnnnnnnnnnnnnnnnnnnnnnnnnnnnnnnnnnnnnnnnnnnnnnnnnnnnnnnnnnnnnnnnnnnnnnnnnnnnnnnnnnnnnnnnnnnnnnnnnnnnnnnnnnnnnnnnnnnnnnnnnnnnnnnnnnnnnnnnnnnnnnnnnnnnnnnnnnnnnnnnnnnnnnnnnnnnnnnnnnnnnnnnnnnnnnnnnnnnnnnnnnnnnnnnnnnnnnnnnnnnnnnnnnnnnnnnnnnnnnnnnnnnnnnnnnnnnnnnnnnnnnnnnnnnnnnnnnnnnnnnnnnnnnnnnnnnnnnnnnnnnnnnnnnnnnnnnnnnnnnnnnnnnnnnnnnnnnnnnnnnnnnnnnnnnnnnnnnnnnnnnnnnnnnnnnnnnnnnnnnnnnnnnnnnnnnnnnnnnnnnnnnnnnnnnnnnnnnnnnnnnnnnnnnnnnnnnnnnnnnnnnnnnnnnnnnnnnnnnnnnnnnnnnnnnnnnnnnnnnnnnnnnnnnnnnnnnnnnnnnnnnnnnnnnnnnnnnnnnnnnnnnnnnnnnnnnnnnnnnnnnnnnnnnnnnnnnnnnnnnnnnnnnnnnnnnnnnnnnnnnnnnnnnnnnnnnnnnnnnnnnnnnnnnnnnnnnnnnnnnnnnnnnnnnnnnnnnnnnnnnnnnnnnnnnnnnnnnnnnnnnnnnnnnnnnnnnnnnnnnnnnnnnnnnnnnnnnnnnnnnnnnnnnnnnnnnnnnnnnnnnnnnnnnnnnnnnnnnnnnnnnnnnnnnnnnnnnnnnnnnnnnnnnnnnnnnnnnnnnnnnnnnnnnnnnnnnnnnnnnnnnnnnnnnnnnnnnnnnnnnnnnnnnnnnnnnnnnnnnnnnnnnnnnnnnnnnnnnnnnnnnnnnnnnnnnnnnnnnnnnnnnnnnnnnnnnnnnnnnnnnnnnnnnnnnnnnnnnnnnnnnnnnnnnnnnnnnnnnnnnnnnnnnnnnnnnnnnnnnnnnnnnnnnnnnnnnnnnnnnnnnnnnnnnnnnnnnnnnnnnnnnnnnnnnnnnnnnnnnnnnnnnnnnnnnnnnnnnnnnnnnnnnnnnnnnnnnnnnnnnnnnnnnnnnnnnnnnnnnnnnnnnnnnnnnnnnnnnnnnnnnnnnnnnnnnnnnnnnnnnnnnnnnnnnnnnnnnnnnnnnnnnnnnnnnnnnnnnnnnnnnnnnnnnnnnnnnnnnnnnnnnnnnnnnnnnnnnnnnnnnnnnnnnnnnnnnnnnnnnnnnnnnnnnnnnnnnnnnnnnnnnnnnnnnnnnnnnnnnnnnnnnnnnnnnnnnnnnnnnnnnnnnnnnnnnnnnnnnnnnnnnnnnnnnnnnnnnnnnnnnnnnnnnnnnnnnnnnnnnnnnnnnnnnnnnnnnnnnnnnnnnnnnnnnnnnnnnnnnnnnnnnnnnnnnnnnnnnnnnnnnnnnnnnnnnnnnnnnnnnnnnnnnnnnnnnnnnnnnnnnnnnnnnnnnnnnnnnnnnnnnnnnnnnnnnnnnnnnnnnnnnnnnnnnnnnnnnnnnnnnnnnnnnnnnnnnnnnnnnnnnnnnnnnnnnnnnnnnnnnnnnnnnnnnnnnnnnnnnnnnnnnnnnnnnnnnnnnnnnnnnnnnnnnnnnnnnnnnnnnnnnnnnnnnnnnnnnnnnnnnnnnnnnnnnnnnnnnnnnnnnnnnnnnnnnnnnnnnnnnnnnnnnnnnnnnnnnnnnnnnnnnnnnnnnnnnnnnnnnnnnnnnnnnnnnnnnnnnnnnnnnnnnnnnnnnnnnnnnnnnnnnnnnnnnnnnnnnnnnnnnnnnnnnnnnnnnnnnnnnnnnnnnnnnnnnnnnnnnnnnnnnnnnnnnnnnnnnnnnnnnnnnnnnnnnnnnnnnnnnnnnnnnnnnnnnnnnnnnnnnnnnnnnnnnnnnnnnnnnnnnnnnnnnnnnnnnnnnnnnnnnnnnnnnnnnnnnnnnnnnnnnnnnnnnnnnnnnnnnnnnnnnnnnnnnnnnnnnnnnnnnnnnnnnnnnnnnnnnnnnnnnnnnnnnnnnnnnnnnnnnnnnnnnnnnnnnnnnnnnnnnnnnnnnnnnnnnnnnnnnnnnnnnnnnnnnnnnnnnnnnnnnnnnnnnnnnnnnnnnnnnnnnnnnnnnnnnnnnnnnnnnnnnnnnnnnnnnnnnnnnnnnnnnnnnnnnnnnnnnnnnnnnnnnnnnnnnnnnnnnnnnnnnnnnnnnnnnnnnnnnnnnnnnnnnnnnnnnnnnnnnnnnnnnnnnnnnnnnnnnnnnnnnnnnnnnnnnnnnnnnnnnnnnnnnnnnnnnnnnnnnnnnnnnnnnnnnnnnnnnnnnnnnnnnnnnnnnnnnnnnnnnnnnnnnnnnnnnnnnnnnnnnnnnnnnnnnnnnnnnnnnnnnnnnnnnnnnnnnnnnnnnnnnnnnnnnnnnnnnnnnnnnnnnnnnnnnnnnnnnnnnnnnnnnnnnnnnnnnnnnnnnnnnnnnnnnnnnnnnnnnnnnnnnnnnnnnnnnnnnnnnnnnnnnnnnnnnnnnnnnnnnnnnnnnnnnnnnnnnnnnnnnnnnnnnnnnnnnnnnnnnnnnnnnnnnnnnnnnnnnnnnnnnnnnnnnnnnnnnnnnnnnnnnnnnnnnnnnnnnnnnnnnnnnnnnnnnnnnnnnnnnnnnnnnnnnnnnnnnnnnnnnnnnnnnnnnnnnnnnnnnnnnnnnnnnnnnnnnnnnnnnnnnnnnnnnnnnnnnnnnnnnnnnnnnnnnnnnnnnnnnnnnnnnnnnnnnnnnnnnnnnnnnnnnnnnnnnnnnnnnnnnnnnnnnnnnnnnnnnnnnnnnnnnnnnnnnnnnnnnnnnnnnnnnnnnnnnnnnnnnnnnnnnnnnnnnnnnnnnnnnnnnnnnnnnnnnnnnnnnnnnnnnnnnnnnnnnnnnnnnnnnnnnnnnnnnnnnnnnnnnnnnnnnnnnnnnnnnnnnnnnnnnnnnnnnnnnnnnnnnnnnnnnnnnnnnnnnnnnnnnnnnnnnnnnnnnnnnnnnnnnnnnnnnnnnnnnnnnnnnnnnnnnnnnnnnnnnnnnnnnnnnnnnnnnnnnnnnnnnnnnnnnnnnnnnnnnnnnnnnnnnnnnnnnnnnnnnnnnnnnnnnnnnnnnnnnnnnnnnnnnnnnnnnnnnnnnnnnnnnnnnnnnnnnnnnnnnnnnnnnnnnnnnnnnnnnnnnnnnnnnnnnnnnnnnnnnnnnnnnnnnnnnnnnnnnnnnnnnnnnnnnnnnnnnnnnnnnnnnnnnnnnnnnnnnnnnnnnnnnnnnnnnnnnnnnnnnnnnnnnnnnnnnnnnnnnnnnnnnnnnnnnnnnnnnnnnnnnnnnnnnnnnnnnnnnnnnnnnnnnnnnnnnnnnnnnnnnnnnnnnnnnnnnnnnnnnnnnnnnnnnnnnnnnnnnnnnnnnnnnnnnnnnnnnnnnnnnnnnnnnnnnnnnnnnnnnnnnnnnnnnnnnnnnnnnnnnnnnnnnnnnnnnnnnnnnnnnnnnnnnnnnnnnnnnnnnnnnnnnnnnnnnnnnnnnnnnnnnnnnnnnnnnnnnnnnnnnnnnnnnnnnnnnnnnnnnnnnnnnnnnnnnnnnnnnnnnnnnnnnnnnnnnnnnnnnnnnnnnnnnnnnnnnnnnnnnnnnnnnnnnnnnnnnnnnnnnnnnnnnnnnnnnnnnnnnnnnnnnnnnnnnnnnnnnnnnnnnnnnnnnnnnnnnnnnnnnnnnnnnnnnnnnnnnnnnnnnnnnnnnnnnnnnnnnnnnnnnnnnnnnnnnnnnnnnnnnnnnnnnnnnnnnnnnnnnnnnnnnnnnnnnnnnnnnnnnnnnnnnnnnnnnnnnnnnnnnnnnnnnnnnnnnnnnnnnnnnnnnnnnnnnnnnnnnnnnnnnnnnnnnnnnnnnnnnnnnnnnnnnnnnnnnnnnnnnnnnnnnnnnnnnnnnnnnnnnnnnnnnnnnnnnnnnnnnnnnnnnnnnnnnnnnnnnnnnnnnnnnnnnnnnnnnnnnnnnnnnnnnnnnnnnnnnnnnnnnnnnnnnnnnnnnnnnnnnnnnnnnnnnnnnnnnnnnnnnnnnnnnnnnnnnnnnnnnnnnnnnnnnnnnnnnnnnnnnnnnnnnnnnnnnnnnnnnnnnnnnnnnnnnnnnnnnnnnnnnnnnnnnnnnnnnnnnnnnnnnnnnnnnnnnnnnnnnnnnnnnnnnnnnnnnnnnnnnnnnnnnnnnnnnnnnnnnnnnnnnnnnnnnnnnnnnnnnnnnnnnnnnnnnnnnnnnnnnnnnnnnnnnnnnnnnnnnnnnnnnnnnnnnnnnnnnnnnnnnnnnnnnnnnnnnnnnnnnnnnnnnnnnnnnnnnnnnnnnnnnnnnnnnnnnnnnnnnnnnnnnnnnnnnnnnnnnnnnnnnnnnnnnnnnnnnnnnnnnnnnnnnnnnnnnnnnnnnnnnnnnnnnnnnnnnnnnnnnnnnnnnnnnnnnnnnnnnnnnnnnnnnnnnnnnnnnnnnnnnnnnnnnnnnnnnnnnnnnnnnnnnnnnnnnnnnnnnnnnnnnnnnnnnnnnnnnnnnnnnnnnnnnnnnnnnnnnnnnnnnnnnnnnnnnnnnnnnnnnnnnnnnnnnnnnnnnnnnnnnnnnnnnnnnnnnnnnnnnnnnnnnnnnnnnnnnnnnnnnnnnnnnnnnnnnnnnnnnnnnnnnnnnnnnnnnnnnnnnnnnnnnnnnnnnnnnnnnnnnnnnnnnnnnnnnnnnnnnnnnnnnnnnnnnnnnnnnnnnnnnnnnnnnnnnnnnnnnnnnnnnnnnnnnnnnnnnnnnnnnnnnnnnnnnnnnnnnnnnnnnnnnnnnnnnnnnnnnnnnnnnnnnnnnnnnnnnnnnnnnnnnnnnnnnnnnnnnnnnnnnnnnnnnnnnnnnnnnnnnnnnnnnnnnnnnnnnnnnnnnnnnnnnnnnnnnnnnnnnnnnnnnnnnnnnnnnnnnnnnnnnnnnnnnnnnnnnnnnnnnnnnnnnnnnnnnnnnnnnnnnnnnnnnnnnnnnnnnnnnnnnnnnnnnnnnnnnnnnnnnnnnnnnnnnnnnnnnnnnnnnnnnnnnnnnnnnnnnnnnnnnnnnnnnnnnnnnnnnnnnnnnnnnnnnnnnnnnnnnnnnnnnnnnnnnnnnnnnnnnnnnnnnnnnnnnnnnnnnnnnnnnnnnnnnnnnnnnnnnnnnnnnnnnnnnnnnnnnnnnnnnnnnnnnnnnnnnnnnnnnnnnnnnnnnnnnnnnnnnnnnnnnnnnnnnnnnnnnnnnnnnnnnnnnnnnnnnnnnnnnnnnnnnnnnnnnnnnnnnnnnnnnnnnnnnnnnnnnnnnnnnnnnnnnnnnnnnnnnnnnnnnnnnnnnnnnnnnnnnnnnnnnnnnnnnnnnnnnnnnnnnnnnnnnnnnnnnnnnnnnnnnnnnnnnnnnnnnnnnnnnnnnnnnnnnnnnnnnnnnnnnnnnnnnnnnnnnnnnnnnnnnnnnnnnnnnnnnnnnnnnnnnnnnnnnnnnnnnnnnnnnnnnnnnnnnnnnnnnnnnnnnnnnnnnnnnnnnnnnnnnnnnnnnnnnnnnnnnnnnnnnnnnnnnnnnnnnnnnnnnnnnnnnnnnnnnnnnnnnnnnnnnnnnnnnnnnnnnnnnnnnnnnnnnnnnnnnnnnnnnnnnnnnnnnnnnnnnnnnnnnnnnnnnnnnnnnnnnnnnnnnnnnnnnnnnnnnnnnnnnnnnnnnnnnnnnnnnnnnnnnnnnnnnnnnnnnnnnnnnnnnnnnnnnnnnnnnnnnnnnnnnnnnnnnnnnnnnnnnnnnnnnnnnnnnnnnnnnnnnnnnnnnnnnnnnnnnnnnnnnnnnnnnnnnnnnnnnnnnnnnnnnnnnnnnnnnnnnnnnnnnnnnnnnnnnnnnnnnnnnnnnnnnnnnnnnnnnnnnnnnnnnnnnnnnnnnnnnnnnnnnnnnnnnnnnnnnnnnnnnnnnnnnnnnnnnnnnnnnnnnnnnnnnnnnnnnnnnnnnnnnnnnnnnnnnnnnnnnnnnnnnnnnnnnnnnnnnnnnnnnnnnnnnnnnnnnnnnnnnnnnnnnnnnnnnnnnnnnnnnnnnnnnnnnnnnnnnnnnnnnnnnnnnnnnnnnnnnnnnnnnnnnnnnnnnnnnnnnnnnnnnnnnnnnnnnnnnnnnnnnnnnnnnnnnnnnnnnnnnnnnnnnnnnnnnnnnnnnnnnnnnnnnnnnnnnnnnnnnnnnnnnnnnnnnnnnnnnnnnnnnnnnnnnnnnnnnnnnnnnnnnnnnnnnnnnnnnnnnnnnnnnnnnnnnnnnnnnnnnnnnnnnnnnnnnnnnnnnnnnnnnnnnnnnnnnnnnnnnnnnnnnnnnnnnnnnnnnnnnnnnnnnnnnnnnnnnnnnnnnnnnnnnnnnnnnnnnnnnnnnnnnnnnnnnnnnnnnnnnnnnnnnnnnnnnnnnnnnnnnnnnnnnnnnnnnnnnnnnnnnnnnnnnnnnnnnnnnnnnnnnnnnnnnnnnnnnnnnnnnnnnnnnnnnnnnnnnnnnnnnnnnnnnnnnnnnnnnnnnnnnnnnnnnnnnnnnnnnnnnnnnnnnnnnnnnnnnnnnnnnnnnnnnnnnnnnnnnnnnnnnnnnnnnnnnnnnnnnnnnnnnnnnnnnnnnnnnnnnnnnnnnnnnnnnnnnnnnnnnnnnnnnnnnnnnnnnnnnnnnnnnnnnnnnnnnnnnnnnnnnnnnnnnnnnnnnnnnnnnnnnnnnnnnnnnnnnnnnnnnnnnnnnnnnnnnnnnnnnnnnnnnnnnnnnnnnnnnnnnnnnnnnnnnnnnnnnnnnnnnnnnnnnnnnnnnnnnnnnnnnnnnnnnnnnnnnnnnnnnnnnnnnnnnnnnnnnnnnnnnnnnnnnnnnnnnnnnnnnnnnnnnnnnnnnnnnnnnnnnnnnnnnnnnnnnnnnnnnnnnnnnnnnnnnnnnnnnnnnnnnnnnnnnnnnnnnnnnnnnnnnnnnnnnnnnnnnnnnnnnnnnnnnnnnnnnnnnnnnnnnnnnnnnnnnnnnnnnnnnnnnnnnnnnnnnnnnnnnnnnnnnnnnnnnnnnnnnnnnnnnnnnnnnnnnnnnnnnnnnnnnnnnnnnnnnnnnnnnnnnnnnnnnnnnnnnnnnnnnnnnnnnnnnnnnnnnnnnnnnnnnnnnnnnnnnnnnnnnnnnnnnnnnnnnnnnnnnnnnnnnnnnnnnnnnnnnnnnnnnnnnnnnnnnnnnnnnnnnnnnnnnnnnnnnnnnnnnnnnnnnnnnnnnnnnnnnnnnnnnnnnnnnnnnnnnnnnnnnnnnnnnnnnnnnnnnnnnnnnnnnnnnnnnnnnnnnnnnnnnnnnnnnnnnnnnnnnnnnnnnnnnnnnnnnnnnnnnnnnnnnnnnnnnnnnnnnnnnnnnnnnnnnnnnnnnnnnnnnnnnnnnnnnnnnnnnnnnnnnnnnnnnnnnnnnnnnnnnnnnnnnnnnnnnnnnnnnnnnnnnnnnnnnnnnnnnnnnnnnnnnnnnnnnnnnnnnnnnnnnnnnnnnnnnnnnnnnnnnnnnnnnnnnnnnnnnnnnnnnnnnnnnnnnnnnnnnnnnnnnnnnnnnnnnnnnnnnnnnnnnnnnnnnnnnnnnnnnnnnnnnnnnnnnnnnnnnnnnnnnnnnnnnnnnnnnnnnnnnnnnnnnnnnnnnnnnnnnnnnnnnnnnnnnnnnnnnnnnnnnnnnnnnnnnnnnnnnnnnnnnnnnnnnnnnnnnnnnnnnnnnnnnnnnnnnnnnnnnnnnnnnnnnnnnnnnnnnnnnnnnnnnnnnnnnnnnnnnnnnnnnnnnnnnnnnnnnnnnnnnnnnnnnnnnnnnnnnnnnnnnnnnnnnnnnnnnnnnnnnnnnnnnnnnnnnnnnnnnnnnnnnnnnnnnnnnnnnnnnnnnnnnnnnnnnnnnnnnnnnnnnnnnnnnnnnnnnnnnnnnnnnnnnnnnnnnnnnnnnnnnnnnnnnnnnnnnnnnnnnnnnnnnnnnnnnnnnnnnnnnnnnnnnnnnnnnnnnnnnnnnnnnnnnnnnnnnnnnnnnnnnnnnnnnnnnnnnnnnnnnnnnnnnnnnnnnnnnnnnnnnnnnnnnnnnnnnnnnnnnnnnnnnnnnnnnnnnnnnnnnnnnnnnnnnnnnnnnnnnnnnnnnnnnnnnnnnnnnnnnnnnnnnnnnnnnnnnnnnnnnnnnnnnnnnnnnnnnnnnnnnnnnnnnnnnnnnnnnnnnnnnnnnnnnnnnnnnnnnnnnnnnnnnnnnnnnnnnnnnnnnnnnnnnnnnnnnnnnnnnnnnnnnnnnnnnnnnnnnnnnnnnnnnnnnnnnnnnnnnnnnnnnnnnnnnnnnnnnnnnnnnnnnnnnnnnnnnnnnnnnnnnnnnnnnnnnnnnnnnnnnnnnnnnnnnnnnnnnnnnnnnnnnnnnnnnnnnnnnnnnnnnnnnnnnnnnnnnnnnnnnnnnnnnnnnnnnnnnnnnnnnnnnnnnnnnnnnnnnnnnnnnnnnnnnnnnnnnnnnnnnnnnnnnnnnnnnnnnnnnnnnnnnnnnnnnnnnnnnnnnnnnnnnnnnnnnnnnnnnnnnnnnnnnnnnnnnnnnnnnnnnnnnnnnnnnnnnnnnnnnnnnnnnnnnnnnnnnnnnnnnnnnnnnnnnnnnnnnnnnnnnnnnnnnnnnnnnnnnnnnnnnnnnnnnnnnnnnnnnnnnnnnnnnnnnnnnnnnnnnnnnnnnnnnnnnnnnnnnnnnnnnnnnnnnnnnnnnnnnnnnnnnnnnnnnnnnnnnnnnnnnnnnnnnnnnnnnnnnnnnnnnnnnnnnnnnnnnnnnnnnnnnnnnnnnnnnnnnnnnnnnnnnnnnnnnnnnnnnnnnnnnnnnnnnnnnnnnnnnnnnnnnnnnnnnnnnnnnnnnnnnnnnnnnnnnnnnnnnnnnnnnnnnnnnnnnnnnnnnnnnnnnnnnnnnnnnnnnnnnnnnnnnnnnnnnnnnnnnnnnnnnnnnnnnnnnnnnnnnnnnnnnnnnnnnnnnnnnnnnnnnnnnnnnnnnnnnnnnnnnnnnnnnnnnnnnnnnnnnnnnnnnnnnnnnnnnnnnnnnnnnnnnnnnnnnnnnnnnnnnnnnnnnnnnnnnnnnnnnnnnnnnnnnnnnnnnnnnnnnnnnnnnnnnnnnnnnnnnnnnnnnnnnnnnnnnnnnnnnnnnnnnnnnnnnnnnnnnnnnnnnnnnnnnnnnnnnnnnnnnnnnnnnnnnnnnnnnnnnnnnnnnnnnnnnnnnnnnnnnnnnnnnnnnnnnnnnnnnnnnnnnnnnnnnnnnnnnnnnnnnnnnnnnnnnnnnnnnnnnnnnnnnnnnnnnnnnnnnnnnnnnnnnnnnnnnnnnnnnnnnnnnnnnnnnnnnnnnnnnnnnnnnnnnnnnnnnnnnnnnnnnnnnnnnnnnnnnnnnnnnnnnnnnnnnnnnnnnnnnnnnnnnnnnnnnnnnnnnnnnnnnnnnnnnnnnnnnnnnnnnnnnnnnnnnnnnnnnnnnnnnnnnnnnnnnnnnnnnnnnnnnnnnnnnnnnnnnnnnnnnnnnnnnnnnnnnnnnnnnnnnnnnnnnnnnnnnnnnnnnnnnnnnnnnnnnnnnnnnnnnnnnnnnnnnnnnnnnnnnnnnnnnnnnnnnnnnnnnnnnnnnnnnnnnnnnnnnnnnnnnnnnnnnnnnnnnnnnnnnnnnnnnnnnnnnnnnnnnnnnnnnnnnnnnnnnnnnnnnnnnnnnnnnnnnnnnnnnnnnnnnnnnnnnnnnnnnnnnnnnnnnnnnnnnnnnnnnnnnnnnnnnnnnnnnnnnnnnnnnnnnnnnnnnnnnnnnnnnnnnnnnnnnnnnnnnnnnnnnnnnnnnnnnnnnnnnnnnnnnnnnnnnnnnnnnnnnnnnnnnnnnnnnnnnnnnnnnnnnnnnnnnnnnnnnnnnnnnnnnnnnnnnnnnnnnnnnnnnnnnnnnnnnnnnnnnnnnnnnnnnnnnnnnnnnnnnnnnnnnnnnnnnnnnnnnnnnnnnnnnnnnnnnnnnnnnnnnnnnnnnnnnnnnnnnnnnnnnnnnnnnnnnnnnnnnnnnnnnnnnnnnnnnnnnnnnnnnnnnnnnnnnnnnnnnnnnnnnnnnnnnnnnnnnnnnnnnnnnnnnnnnnnnnnnnnnnnnnnnnnnnnnnnnnnnnnnnnnnnnnnnnnnnnnnnnnnnnnnnnnnnnnnnnnnnnnnnnnnnnnnnnnnnnnnnnnnnnnnnnnnnnnnnnnnnnnnnnnnnnnnnnnnnnnnnnnnnnnnnnnnnnnnnnnnnnnnnnnnnnnnnnnnnnnnnnnnnnnnnnnnnnnnnnnnnnnnnnnnnnnnnnnnnnnnnnnnnnnnnnnnnnnnnnnnnnnnnnnnnnnnnnnnnnnnnnnnnnnnnnnnnnnnnnnnnnnnnnnnnnnnnnnnnnnnnnnnnnnnnnnnnnnnnnnnnnnnnnnnnnnnnnnnnnnnnnnnnnnnnnnnnnnnnnnnnnnnnnnnnnnnnnnnnnnnnnnnnnnnnnnnnnnnnnnnnnnnnnnnnnnnnnnnnnnnnnnnnnnnnnnnnnnnnnnnnnnnnnnnnnnnnnnnnnnnnnnnnnnnnnnnnnnnnnnnnnnnnnnnnnnnnnnnnnnnnnnnnnnnnnnnnnnnnnnnnnnnnnnnnnnnnnnnnnnnnnnnnnnnnnnnnnnnnnnnnnnnnnnnnnnnnnnnnnnnnnnnnnnnnnnnnnnnnnnnnnnnnnnnnnnnnnnnnnnnnnnnnnnnnnnnnnnnnnnnnnnnnnnnnnnnnnnnnnnnnnnnnnnnnnnnnnnnnnnnnnnnnnnnnnnnnnnnnnnnnnnnnnnnnnnnnnnnnnnnnnnnnnnnnnnnnnnnnnnnnnnnnnnnnnnnnnnnnnnnnnnnnnnnnnnnnnnnnnnnnnnnnnnnnnnnnnnnnnnnnnnnnnnnnnnnnnnnnnnnnnnnnnnnnnnnnnnnnnnnnnnnnnnnnnnnnnnnnnnnnnnnnnnnnnnnnnnnnnnnnnnnnnnnnnnnnnnnnnnnnnnnnnnnnnnnnnnnnnnnnnnnnnnnnnnnnnnnnnnnnnnnnnnnnnnnnnnnnnnnnnnnnnnnnnnnnnnnnnnnnnnnnnnnnnnnnnnnnnnnnnnnnnnnnnnnnnnnnnnnnnnnnnnnnnnnnnnnnnnnnnnnnnnnnnnnnnnnnnnnnnnnnnnnnnnnnnnnnnnnnnnnnnnnnnnnnnnnnnnnnnnnnnnnnnnnnnnnnnnnnnnnnnnnnnnnnnnnnnnnnnnnnnnnnnnnnnnnnnnnnnnnnnnnnnnnnnnnnnnnnnnnnnnnnnnnnnnnnnnnnnnnnnnnnnnnnnnnnnnnnnnnnnnnnnnnnnnnnnnnnnnnnnnnnnnnnnnnnnnnnnnnnnnnnnnnnnnnnnnnnnnnnnnnnnnnnnnnnnnnnnnnnnnnnnnnnnnnnnnnnnnnnnnnnnnnnnnnnnnnnnnnnnnnnnnnnnnnnnnnnnnnnnnnnnnnnnnnnnnnnnnnnnnnnnnnnnnnnnnnnnnnnnnnnnnnnnnnnnnnnnnnnnnnnnnnnnnnnnnnnnnnnnnnnnnnnnnnnnnnnnnnnnnnnnnnnnnnnnnnnnnnnnnnnnnnnnnnnnnnnnnnnnnnnnnnnnnnnnnnnnnnnnnnnnnnnnnnnnnnnnnnnnnnnnnnnnnnnnnnnnnnnnnnnnnnnnnnnnnnnnnnnnnnnnnnnnnnnnnnnnnnnnnnnnnnnnnnnnnnnnnnnnnnnnnnnnnnnnnnnnnnnnnnnnnnnnnnnnnnnnnnnnnnnnnnnnnnnnnnnnnnnnnnnnnnnnnnnnnnnnnnnnnnnnnnnnnnnnnnnnnnnnnnnnnnnnnnnnnnnnnnnnnnnnnnnnnnnnnnnnnnnnnnnnnnnnnnnnnnnnnnnnnnnnnnnnnnnnnnnnnnnnnnnnnnnnnnnnnnnnnnnnnnnnnnnnnnnnnnnnnnnnnnnnnnnnnnnnnnnnnnnnnnnnnnnnnnnnnnnnnnnnnnnnnnnnnnnnnnnnnnnnnnnnnnnnnnnnnnnnnnnnnnnnnnnnnnnnnnnnnnnnnnnnnnnnnnnnnnnnnnnnnnnnnnnnnnnnnnnnnnnnnnnnnnnnnnnnnnnnnnnnnnnnnnnnnnnnnnnnnnnnnnnnnnnnnnnnnnnnnnnnnnnnnnnnnnnnnnnnnnnnnnnnnnnnnnnnnnnnnnnnnnnnnnnnnnnnnnnnnnnnnnnnnnnnnnnnnnnnnnnnnnnnnnnnnnnnnnnnnnnnnnnnnnnnnnnnnnnnnnnnnnnnnnnnnnnnnnnnnnnnnnnnnnnnnnnnnnnnnnnnnnnnnnnnnnnnnnnnnnnnnnnnnnnnnnnnnnnnnnnnnnnnnnnnnnnnnnnnnnnnnnnnnnnnnnnnnnnnnnnnnnnnnnnnnnnnnnnnnnnnnnnnnnnnnnnnnnnnnnnnnnnnnnnnnnnnnnnnnnnnnnnnnnnnnnnnnnnnnnnnnnnnnnnnnnnnnnnnnnnnnnnnnnnnnnnnnnnnnnnnnnnnnnnnnnnnnnnnnnnnnnnnnnnnnnnnnnnnnnnnnnnnnnnnnnnnnnnnnnnnnnnnnnnnnnnnnnnnnnnnnnnnnnnnnnnnnnnnnnnnnnnnnnnnnnnnnnnnnnnnnnnnnnnnnnnnnnnnnnnnnnnnnnnnnnnnnnnnnnnnnnnnnnnnnnnnnnnnnnnnnnnnnnnnnnnnnnnnnnnnnnnnnnnnnnnnnnnnnnnnnnnnnnnnnnnnnnnnnnnnnnnnnnnnnnnnnnnnnnnnnnnnnnnnnnnnnnnnnnnnnnnnnnnnnnnnnnnnnnnnnnnnnnnnnnnnnnnnnnnnnnnnnnnnnnnnnnnnnnnnnnnnnnnnnnnnnnnnnnnnnnnnnnnnnnnnnnnnnnnnnnnnnnnnnnnnnnnnnnnnnnnnnnnnnnnnnnnnnnnnnnnnnnnnnnnnnnnnnnnnnnnnnnnnnnnnnnnnnnnnnnnnnnnnnnnnnnnnnnnnnnnnnnnnnnnnnnnnnnnnnnnnnnnnnnnnnnnnnnnnnnnnnnnnnnnnnnnnnnnnnnnnnnnnnnnnnnnnnnnnnnnnnnnnnnnnnnnnnnnnnnnnnnnnnnnnnnnnnnnnnnnnnnnnnnnnnnnnnnnnnnnnnnnnnnnnnnnnnnnnnnnnnnnnnnnnnnnnnnnnnnnnnnnnnnnnnnnnnnnnnnnnnnnnnnnnnnnnnnnnnnnnnnnnnnnnnnnnnnnnnnnnnnnnnnnnnnnnnnnnnnnnnnnnnnnnnnnnnnnnnnnnnnnnnnnnnnnnnnnnnnnnnnnnnnnnnnnnnnnnnnnnnnnnnnnnnnnnnnnnnnnnnnnnnnnnnnnnnnnnnnnnnnnnnnnnnnnnnnnnnnnnnnnnnnnnnnnnnnnnnnnnnnnnnnnnnnnnnnnnnnnnnnnnnnnnnnnnnnnnnnnnnnnnnnnnnnnnnnnnnnnnnnnnnnnnnnnnnnnnnnnnnnnnnnnnnnnnnnnnnnnnnnnnnnnnnnnnnnnnnnnnnnnnnnnnnnnnnnnnnnnnnnnnnnnnnnnnnnnnnnnnnnnnnnnnnnnnnnnnnnnnnnnnnnnnnnnnnnnnnnnnnnnnnnnnnnnnnnnnnnnnnnnnnnnnnnnnnnnnnnnnnnnnnnnnnnnnnnnnnnnnnnnnnnnnnnnnnnnnnnnnnnnnnnnnnnnnnnnnnnnnnnnnnnnnnnnnnnnnnnnnnnnnnnnnnnnnnnnnnnnnnnnnnnnnnnnnnnnnnnnnnnnnnnnnnnnnnnnnnnnnnnnnnnnnnnnnnnnnnnnnnnnnnnnnnnnnnnnnnnnnnnnnnnnnnnnnnnnnnnnnnnnnnnnnnnnnnnnnnnnnnnnnnnnnnnnnnnnnnnnnnnnnnnnnnnnnnnnnnnnnnnnnnnnnnnnnnnnnnnnnnnnnnnnnnnnnnnnnnnnnnnnnnnnnnnnnnnnnnnnnnnnnnnnnnnnnnnnnnnnnnnnnnnnnnnnnnnnnnnnnnnnnnnnnnnnnnnnnnnnnnnnnnnnnnnnnnnnnnnnnnnnnnnnnnnnnnnnnnnnnnnnnnnnnnnnnnnnnnnnnnnnnnnnnnnnnnnnnnnnnnnnnnnnnnnnnnnnnnnnnnnnnnnnnnnnnnnnnnnnnnnnnnnnnnnnnnnnnnnnnnnnnnnnnnnnnnnnnnnnnnnnnnnnnnnnnnnnnnnnnnnnnnnnnnnnnnnnnnnnnnnnnnnnnnnnnnnnnnnnnnnnnnnnnnnnnnnnnnnnnnnnnnnnnnnnnnnnnnnnnnnnnnnnnnnnnnnnnnnnnnnnnnnnnnnnnnnnnnnnnnnnnnnnnnnnnnnnnnnnnnnnnnnnnnnnnnnnnnnnnnnnnnnnnnnnnnnnnnnnnnnnnnnnnnnnnnnnnnnnnnnnnnnnnnnnnnnnnnnnnnnnnnnnnnnnnnnnnnnnnnnnnnnnnnnnnnnnnnnnnnnnnnnnnnnnnnnnnnnnnnnnnnnnnnnnnnnnnnnnnnnnnnnnnnnnnnnnnnnnnnnnnnnnnnnnnnnnnnnnnnnnnnnnnnnnnnnnnnnnnnnnnnnnnnnnnnnnnnnnnnnnnnnnnnnnnnnnnnnnnnnnnnnnnnnnnnnnnnnnnnnnnnnnnnnnnnnnnnnnnnnnnnnnnnnnnnnnnnnnnnnnnnnnnnnnnnnnnnnnnnnnnnnnnnnnnnnnnnnnnnnnnnnnnnnnnnnnnnnnnnnnnnnnnnnnnnnnnnnnnnnnnnnnnnnnnnnnnnnnnnnnnnnnnnnnnnnnnnnnnnnnnnnnnnnnnnnnnnnnnnnnnnnnnnnnnnnnnnnnnnnnnnnnnnnnnnnnnnnnnnnnnnnnnnnnnnnnnnnnnnnnnnnnnnnnnnnnnnnnnnnnnnnnnnnnnnnnnnnnnnnnnnnnnnnnnnnnnnnnnnnnnnnnnnnnnnnnnnnnnnnnnnnnnnnnnnnnnnnnnnnnnnnnnnnnnnnnnnnnnnnnnnnnnnnnnnnnnnnnnnnnnnnnnnnnnnnnnnnnnnnnnnnnnnnnnnnnnnnnnnnnnnnnnnnnnnnnnnnnnnnnnnnnnnnnnnnnnnnnnnnnnnnnnnnnnnnnnnnnnnnnnnnnnnnnnnnnnnnnnnnnnnnnnnnnnnnnnnnnnnnnnnnnnnnnnnnnnnnnnnnnnnnnnnnnnnnnnnnnnnnnnnnnnnnnnnnnnnnnnnnnnnnnnnnnnnnnnnnnnnnnnnnnnnnnnnnnnnnnnnnnnnnnnnnnnnnnnnnnnnnnnnnnnnnnnnnnnnnnnnnnnnnnnnnnnnnnnnnnnnnnnnnnnnnnnnnnnnnnnnnnnnnnnnnnnnnnnnnnnnnnnnnnnnnnnnnnnnnnnnnnnnnnnnnnnnnnnnnnnnnnnnnnnnnnnnnnnnnnnnnnnnnnnnnnnnnnnnnnnnnnnnnnnnnnnnnnnnnnnnnnnnnnnnnnnnnnnnnnnnnnnnnnnnnnnnnnnnnnnnnnnnnnnnnnnnnnnnnnnnnnnnnnnnnnnnnnnnnnnnnnnnnnnnnnnnnnnnnnnnnnnnnnnnnnnnnnnnnnnnnnnnnnnnnnnnnnnnnnnnnnnnnnnnnnnnnnnnnnnnnnnnnnnnnnnnnnnnnnnnnnnnnnnnnnnnnnnnnnnnnnnnnnnnnnnnnnnnnnnnnnnnnnnnnnnnnnnnnnnnnnnnnnnnnnnnnnnnnnnnnnnnnnnnnnnnnnnnnnnnnnnnnnnnnnnnnnnnnnnnnnnnnnnnnnnnnnnnnnnnnnnnnnnnnnnnnnnnnnnnnnnnnnnnnnnnnnnnnnnnnnnnnnnnnnnnnnnnnnnnnnnnnnnnnnnnnnnnnnnnnnnnnnnnnnnnnnnnnnnnnnnnnnnnnnnnnnnnnnnnnnnnnnnnnnnnnnnnnnnnnnnnnnnnnnnnnnnnnnnnnnnnnnnnnnnnnnnnnnnnnnnnnnnnnnnnnnnnnnnnnnnnnnnnnnnnnnnnnnnnnnnnnnnnnnnnnnnnnnnnnnnnnnnnnnnnnnnnnnnnnnnnnnnnnnnnnnnnnnnnnnnnnnnnnnnnnnnnnnnnnnnnnnnnnnnnnnnnnnnnnnnnnnnnnnnnnnnnnnnnnnnnnnnnnnnnnnnnnnnnnnnnnnnnnnnnnnnnnnnnnnnnnnnnnnnnnnnnnnnnnnnnnnnnnnnnnnnnnnnnnnnnnnnnnnnnnnnnnnnnnnnnnnnnnnnnnnnnnnnnnnnnnnnnnnnnnnnnnnnnnnnnnnnnnnnnnnnnnnnnnnnnnnnnnnnnnnnnnnnnnnnnnnnnnnnnnnnnnnnnnnnnnnnnnnnnnnnnnnnnnnnnnnnnnnnnnnnnnnnnnnnnnnnnnnnnnnnnnnnnnnnnnnnnnnnnnnnnnnnnnnnnnnnnnnnnnnnnnnnnnnnnnnnnnnnnnnnnnnnnnnnnnnnnnnnnnnnnnnnnnnnnnnnnnnnnnnnnnnnnnnnnnnnnnnnnnnnnnnnnnnnnnnnnnnnnnnnnnnnnnnnnnnnnnnnnnnnnnnnnnnnnnnnnnnnnnnnnnnnnnnnnnnnnnnnnnnnnnnnnnnnnnnnnnnnnnnnnnnnnnnnnnnnnnnnnnnnnnnnnnnnnnnnnnnnnnnnnnnnnnnnnnnnnnnnnnnnnnnnnnnnnnnnnnnnnnnnnnnnnnnnnnnnnnnnnnnnnnnnnnnnnnnnnnnnnnnnnnnnnnnnnnnnnnnnnnnnnnnnnnnnnnnnnnnnnnnnnnnnnnnnnnnnnnnnnnnnnnnnnnnnnnnnnnnnnnnnnnnnnnnnnnnnnnnnnnnnnnnnnnnnnnnnnnnnnnnnnnnnnnnnnnnnnnnnnnnnnnnnnnnnnnnnnnnnnnnnnnnnnnnnnnnnnnnnnnnnnnnnnnnnnnnnnnnnnnnnnnnnnnnnnnnnnnnnnnnnnnnnnnnnnnnnnnnnnnnnnnnnnnnnnnnnnnnnnnnnnnnnnnnnnnnnnnnnnnnnnnnnnnnnnnnnnnnnnnnnnnnnnnnnnnnnnnnnnnnnnnnnnnnnnnnnnnnnnnnnnnnnnnnnnnnnnnnnnnnnnnnnnnnnnnnnnnnnnnnnnnnnnnnnnnnnnnnnnnnnnnnnnnnnnnnnnnnnnnnnnnnnnnnnnnnnnnnnnnnnnnnnnnnnnnnnnnnnnnnnnnnnnnnnnnnnnnnnnnnnnnnnnnnnnnnnnnnnnnnnnnnnnnnnnnnnnnnnnnnnnnnnnnnnnnnnnnnnnnnnnnnnnnnnnnnnnnnnnnnnnnnnnnnnnnnnnnnnnnnnnnnnnnnnnnnnnnnnnnnnnnnnnnnnnnnnnnnnnnnnnnnnnnnnnnnnnnnnnnnnnnnnnnnnnnnnnnnnnnnnnnnnnnnnnnnnnnnnnnnnnnnnnnnnnnnnnnnnnnnnnnnnnnnnnnnnnnnnnnnnnnnnnnnnnnnnnnnnnnnnnnnnnnnnnnnnnnnnnnnnnnnnnnnnnnnnnnnnnnnnnnnnnnnnnnnnnnnnnnnnnnnnnnnnnnnnnnnnnnnnnnnnnnnnnnnnnnnnnnnnnnnnnnnnnnnnnnnnnnnnnnnnnnnnnnnnnnnnnnnnnnnnnnnnnnnnnnnnnnnnnnnnnnnnnnnnnnnnnnnnnnnnnnnnnnnnnnnnnnnnnnnnnnnnnnnnnnnnnnnnnnnnnnnnnnnnnnnnnnnnnnnnnnnnnnnnnnnnnnnnnnnnnnnnnnnnnnnnnnnnnnnnnnnnnnnnnnnnnnnnnnnnnnnnnnnnnnnnnnnnnnnnnnnnnnnnnnnnnnnnnnnnnnnnnnnnnnnnnnnnnnnnnnnnnnnnnnnnnnnnnnnnnnnnnnnnnnnnnnnnnnnnnnnnnnnnnnnnnnnnnnnnnnnnnnnnnnnnnnnnnnnnnnnnnnnnnnnnnnnnnnnnnnnnnnnnnnnnnnnnnnnnnnnnnnnnnnnnnnnnnnnnnnnnnnnnnnnnnnnnnnnnnnnnnnnnnnnnnnnnnnnnnnnnnnnnnnnnnnnnnnnnnnnnnnnnnnnnnnnnnnnnnnnnnnnnnnnnnnnnnnnnnnnnnnnnnnnnnnnnnnnnnnnnnnnnnnnnnnnnnnnnnnnnnnnnnnnnnnnnnnnnnnnnnnnnnnnnnnnnnnnnnnnnnnnnnnnnnnnnnnnnnnnnnnnnnnnnnnnnnnnnnnnnnnnnnnnnnnnnnnnnnnnnnnnnnnnnnnnnnnnnnnnnnnnnnnnnnnnnnnnnnnnnnnnnnnnnnnnnnnnnnnnnnnnnnnnnnnnnnnnnnnnnnnnnnnnnnnnnnnnnnnnnnnnnnnnnnnnnnnnnnnnnnnnnnnnnnnnnnnnnnnnnnnnnnnnnnnnnnnnnnnnnnnnnnnnnnnnnnnnnnnnnnnnnnnnnnnnnnnnnnnnnnnnnnnnnnnnnnnnnnnnnnnnnnnnnnnnnnnnnnnnnnnnnnnnnnnnnnnnnnnnnnnnnnnnnnnnnnnnnnnnnnnnnnnnnnnnnnnnnnnnnnnnnnnnnnnnnnnnnnnnnnnnnnnnnnnnnnnnnnnnnnnnnnnnnnnnnnnnnnnnnnnnnnnnnnnnnnnnnnnnnnnnnnnnnnnnnnnnnnnnnnnnnnnnnnnnnnnnnnnnnnnnnnnnnnnnnnnnnnnnnnnnnnnnnnnnnnnnnnnnnnnnnnnnnnnnnnnnnnnnnnnnnnnnnnnnnnnnnnnnnnnnnnnnnnnnnnnnnnnnnnnnnnnnnnnnnnnnnnnnnnnnnnnnnnnnnnnnnnnnnnnnnnnnnnnnnnnnnnnnnnnnnnnnnnnnnnnnnnnnnnnnnnnnnnnnnnnnnnnnnnnnnnnnnnnnnnnnnnnnnnnnnnnnnnnnnnnnnnnnnnnnnnnnnnnnnnnnnnnnnnnnnnnnnnnnnnnnnnnnnnnnnnnnnnnnnnnnnnnnnnnnnnnnnnnnnnnnnnnnnnnnnnnnnnnnnnnnnnnnnnnnnnnnnnnnnnnnnnnnnnnnnnnnnnnnnnnnnnnnnnnnnnnnnnnnnnnnnnnnnnnnnnnnnnnnnnnnnnnnnnnnnnnnnnnnnnnnnnnnnnnnnnnnnnnnnnnnnnnnnnnnnnnnnnnnnnnnnnnnnnnnnnnnnnnnnnnnnnnnnnnnnnnnnnnnnnnnnnnnnnnnnnnnnnnnnnnnnnnnnnnnnnnnnnnnnnnnnnnnnnnnnnnnnnnnnnnnnnnnnnnnnnnnnnnnnnnnnnnnnnnnnnnnnnnnnnnnnnnnnnnnnnnnnnnnnnnnnnnnnnnnnnnnnnnnnnnnnnnnnnnnnnnnnnnnnnnnnnnnnnnnnnnnnnnnnnnnnnnnnnnnnnnnnnnnnnnnnnnnnnnnnnnnnnnnnnnnnnnnnnnnnnnnnnnnnnnnnnnnnnnnnnnnnnnnnnnnnnnnnnnnnnnnnnnnnnnnnnnnnnnnnnnnnnnnnnnnnnnnnnnnnnnnnnnnnnnnnnnnnnnnnnnnnnnnnnnnnnnnnnnnnnnnnnnnnnnnnnnnnnnnnnnnnnnnnnnnnnnnnnnnnnnnnnnnnnnnnnnnnnnnnnnnnnnnnnnnnnnnnnnnnnnnnnnnnnnnnnnnnnnnnnnnnnnnnnnnnnnnnnnnnnnnnnnnnnnnnnnnnnnnnnnnnnnnnnnnnnnnnnnnnnnnnnnnnnnnnnnnnnnnnnnnnnnnnnnnnnnnnnnnnnnnnnnnnnnnnnnnnnnnnnnnnnnnnnnnnnnnnnnnnnnnnnnnnnnnnnnnnnnnnnnnnnnnnnnnnnnnnnnnnnnnnnnnnnnnnnnnnnnnnnnnnnnnnnnnnnnnnnnnnnnnnnnnnnnnnnnnnnnnnnnnnnnnnnnnnnnnnnnnnnnnnnnnnnnnnnnnnnnnnnnnnnnnnnnnnnnnnnnnnnnnnnnnnnnnnnnnnnnnnnnnnnnnnnnnnnnnnnnnnnnnnnnnnnnnnnnnnnnnnnnnnnnnnnnnnnnnnnnnnnnnnnnnnnnnnnnnnnnnnnnnnnnnnnnnnnnnnnnnnnnnnnnnnnnnnnnnnnnnnnnnnnnnnnnnnnnnnnnnnnnnnnnnnnnnnnnnnnnnnnnnnnnnnnnnnnnnnnnnnnnnnnnnnnnnnnnnnnnnnnnnnnnnnnnnnnnnnnnnnnnnnnnnnnnnnnnnnnnnnnnnnnnnnnnnnnnnnnnnnnnnnnnnnnnnnnnnnnnnnnnnnnnnnnnnnnnnnnnnnnnnnnnnnnnnnnnnnnnnnnnnnnnnnnnnnnnnnnnnnnnnnnnnnnnnnnnnnnnnnnnnnnnnnnnnnnnnnnnnnnnnnnnnnnnnnnnnnnnnnnnnnnnnnnnnnnnnnnnnnnnnnnnnnnnnnnnnnnnnnnnnnnnnnnnnnnnnnnnnnnnnnnnnnnnnnnnnnnnnnnnnnnnnnnnnnnnnnnnnnnnnnnnnnnnnnnnnnnnnnnnnnnnnnnnnnnnnnnnnnnnnnnnnnnnnnnnnnnnnnnnnnnnnnnnnnnnnnnnnnnnnnnnnnnnnnnnnnnnnnnnnnnnnnnnnnnnnnnnnnnnnnnnnnnnnnnnnnnnnnnnnnnnnnnnnnnnnnnnnnnnnnnnnnnnnnnnnnnnnnnnnnnnnnnnnnnnnnnnnnnnnnnnnnnnnnnnnnnnnnnnnnnnnnnnnnnnnnnnnnnnnnnnnnnnnnnnnnnnnnnnnnnnnnnnnnnnnnnnnnnnnnnnnnnnnnnnnnnnnnnnnnnnnnnnnnnnnnnnnnnnnnnnnnnnnnnnnnnnnnnnnnnnnnnnnnnnnnnnnnnnnnnnnnnnnnnnnnnnnnnnnnnnnnnnnnnnnnnnnnnnnnnnnnnnnnnnnnnnnnnnnnnnnnnnnnnnnnnnnnnnnnnnnnnnnnnnnnnnnnnnnnnnnnnnnnnnnnnnnnnnnnnnnnnnnnnnnnnnnnnnnnnnnnnnnnnnnnnnnnnnnnnnnnnnnnnnnnnnnnnnnnnnnnnnnnnnnnnnnnnnnnnnnnnnnnnnnnnnnnnnnnnnnnnnnnnnnnnnnnnnnnnnnnnnnnnnnnnnnnnnnnnnnnnnnnnnnnnnnnnnnnnnnnnnnnnnnnnnnnnnnnnnnnnnnnnnnnnnnnnnnnnnnnnnnnnnnnnnnnnnnnnnnnnnnnnnnnnnnnnnnnnnnnnnnnnnnnnnnnnnnnnnnnnnnnnnnnnnnnnnnnnnnnnnnnnnnnnnnnnnnnnnnnnnnnnnnnnnnnnnnnnnnnnnnnnnnnnnnnnnnnnnnnnnnnnnnnnnnnnnnnnnnnnnnnnnnnnnnnnnnnnnnnnnnnnnnnnnnnnnnnnnnnnnnnnnnnnnnnnnnnnnnnnnnnnnnnnnnnnnnnnnnnnnnnnnnnnnnnnnnnnnnnnnnnnnnnnnnnnnnnnnnnnnnnnnnnnnnnnnnnnnnnnnnnnnnnnnnnnnnnnnnnnnnnnnnnnnnnnnnnnnnnnnnnnnnnnnnnnnnnnnnnnnnnnnnnnnnnnnnnnnnnnnnnnnnnnnnnnnnnnnnnnnnnnnnnnnnnnnnnnnnnnnnnnnnnnnnnnnnnnnnnnnnnnnnnnnnnnnnnnnnnnnnnnnnnnnnnnnnnnnnnnnnnnnnnnnnnnnnnnnnnnnnnnnnnnnnnnnnnnnnnnnnnnnnnnnnnnnnnnnnnnnnnnnnnnnnnnnnnnnnnnnnnnnnnnnnnnnnnnnnnnnnnnnnnnnnnnnnnnnnnnnnnnnnnnnnnnnnnnnnnnnnnnnnnnnnnnnnnnnnnnnnnnnnnnnnnnnnnnnnnnnnnnnnnnnnnnnnnnnnnnnnnnnnnnnnnnnnnnnnnnnnnnnnnnnnnnnnnnnnnnnnnnnnnnnnnnnnnnnnnnnnnnnnnnnnnnnnnnnnnnnnnnnnnnnnnnnnnnnnnnnnnnnnnnnnnnnnnnnnnnnnnnnnnnnnnnnnnnnnnnnnnnnnnnnnnnnnnnnnnnnnnnnnnnnnnnnnnnnnnnnnnnnnnnnnnnnnnnnnnnnnnnnnnnnnnnnnnnnnnnnnnnnnnnnnnnnnnnnnnnnnnnnnnnnnnnnnnnnnnnnnnnnnnnnnnnnnnnnnnnnnnnnnnnnnnnnnnnnnnnnnnnnnnnnnnnnnnnnnnnnnnnnnnnnnnnnnnnnnnnnnnnnnnnnnnnnnnnnnnnnnnnnnnnnnnnnnnnnnnnnnnnnnnnnnnnnnnnnnnnnnnnnnnnnnnnnnnnnnnnnnnnnnnnnnnnnnnnnnnnnnnnnnnnnnnnnnnnnnnnnnnnnnnnnnnnnnnnnnnnnnnnnnnnnnnnnnnnnnnnnnnnnnnnnnnnnnnnnnnnnnnnnnnnnnnnnnnnnnnnnnnnnnnnnnnnnnnnnnnnnnnnnnnnnnnnnnnnnnnnnnnnnnnnnnnnnnnnnnnnnnnnnnnnnnnnnnnnnnnnnnnnnnnnnnnnnnnnnnnnnnnnnnnnnnnnnnnnnnnnnnnnnnnnnnnnnnnnnnnnnnnnnnnnnnnnnnnnnnnnnnnnnnnnnnnnnnnnnnnnnnnnnnnnnnnnnnnnnnnnnnnnnnnnnnnnnnnnnnnnnnnnnnnnnnnnnnnnnnnnnnnnnnnnnnnnnnnnnnnnnnnnnnnnnnnnnnnnnnnnnnnnnnnnnnnnnnnnnnnnnnnnnnnnnnnnnnnnnnnnnnnnnnnnnnnnnnnnnnnnnnnnnnnnnnnnnnnnnnnnnnnnnnnnnnnnnnnnnnnnnnnnnnnnnnnnnnnnnnnnnnnnnnnnnnnnnnnnnnnnnnnnnnnnnnnnnnnnnnnnnnnnnnnnnnnnnnnnnnnnnnnnnnnnnnnnnnnnnnnnnnnnnnnnnnnnnnnnnnnnnnnnnnnnnnnnnnnnnnnnnnnnnnnnnnnnnnnnnnnnnnnnnnnnnnnnnnnnnnnnnnnnnnnnnnnnnnnnnnnnnnnnnnnnnnnnnnnnnnnnnnnnnnnnnnnnnnnnnnnnnnnnnnnnnnnnnnnnnnnnnnnnnnnnnnnnnnnnnnnnnnnnnnnnnnnnnnnnnnnnnnnnnnnnnnnnnnnnnnnnnnnnnnnnnnnnnnnnnnnnnnnnnnnnnnnnnnnnnnnnnnnnnnnnnnnnnnnnnnnnnnnnnnnnnnnnnnnnnnnnnnnnnnnnnnnnnnnnnnnnnnnnnnnnnnnnnnnnnnnnnnnnnnnnnnnnnnnnnnnnnnnnnnnnnnnnnnnnnnnnnnnnnnnnnnnnnnnnnnnnnnnnnnnnnnnnnnnnnnnnnnnnnnnnnnnnnnnnnnnnnnnnnnnnnnnnnnnnnnnnnnnnnnnnnnnnnnnnnnnnnnnnnnnnnnnnnnnnnnnnnnnnnnnnnnnnnnnnnnnnnnnnnnnnnnnnnnnnnnnnnnnnnnnnnnnnnnnnnnnnnnnnnnnnnnnnnnnnnnnnnnnnnnnnnnnnnnnnnnnnnnnnnnnnnnnnnnnnnnnnnnnnnnnnnnnnnnnnnnnnnnnnnnnnnnnnnnnnnnnnnnnnnnnnnnnnnnnnnnnnnnnnnnnnnnnnnnnnnnnnnnnnnnnnnnnnnnnnnnnnnnnnnnnnnnnnnnnnnnnnnnnnnnnnnnnnnnnnnnnnnnnnnnnnnnnnnnnnnnnnnnnnnnnnnnnnnnnnnnnnnnnnnnnnnnnnnnnnnnnnnnnnnnnnnnnnnnnnnnnnnnnnnnnnnnnnnnnnnnnnnnnnnnnnnnnnnnnnnnnnnnnnnnnnnnnnnnnnnnnnnnnnnnnnnnnnnnnnnnnnnnnnnnnnnnnnnnnnnnnnnnnnnnnnnnnnnnnnnnnnnnnnnnnnnnnnnnnnnnnnnnnnnnnnnnnnnnnnnnnnnnnnnnnnnnnnnnnnnnnnnnnnnnnnnnnnnnnnnnnnnnnnnnnnnnnnnnnnnnnnnnnnnnnnnnnnnnnnnnnnnnnnnnnnnnnnnnnnnnnnnnnnnnnnnnnnnnnnnnnnnnnnnnnnnnnnnnnnnnnnnnnnnnnnnnnnnnnnnnnnnnnnnnnnnnnnnnnnnnnnnnnnnnnnnnnnnnnnnnnnnnnnnnnnnnnnnnnnnnnnnnnnnnnnnnnnnnnnnnnnnnnnnnnnnnnnnnnnnnnnnnnnnnnnnnnnnnnnnnnnnnnnnnnnnnnnnnnnnnnnnnnnnnnnnnnnnnnnnnnnnnnnnnnnnnnnnnnnnnnnnnnnnnnnnnnnnnnnnnnnnnnnnnnnnnnnnnnnnnnnnnnnnnnnnnnnnnnnnnnnnnnnnnnnnnnnnnnnnnnnnnnnnnnnnnnnnnnnnnnnnnnnnnnnnnnnnnnnnnnnnnnnnnnnnnnnnnnnnnnnnnnnnnnnnnnnnnnnnnnnnnnnnnnnnnnnnnnnnnnnnnnnnnnnnnnnnnnnnnnnnnnnnnnnnnnnnnnnnnnnnnnnnnnnnnnnnnnnnnnnnnnnnnnnnnnnnnnnnnnnnnnnnnnnnnnnnnnnnnnnnnnnnnnnnnnnnnnnnnnnnnnnnnnnnnnnnnnnnnnnnnnnnnnnnnnnnnnnnnnnnnnnnnnnnnnnnnnnnnnnnnnnnnnnnnnnnnnnnnnnnnnnnnnnnnnnnnnnnnnnnnnnnnnnnnnnnnnnnnnnnnnnnnnnnnnnnnnnnnnnnnnnnnnnnnnnnnnnnnnnnnnnnnnnnnnnnnnnnnnnnnnnnnnnnnnnnnnnnnnnnnnnnnnnnnnnnnnnnnnnnnnnnnnnnnnnnnnnnnnnnnnnnnnnnnnnnnnnnnnnnnnnnnnnnnnnnnnnnnnnnnnnnnnnnnnnnnnnnnnnnnnnnnnnnnnnnnnnnnnnnnnnnnnnnnnnnnnnnnnnnnnnnnnnnnnnnnnnnnnnnnnnnnnnnnnnnnnnnnnnnnnnnnnnnnnnnnnnnnnnnnnnnnnnnnnnnnnnnnnnnnnnnnnnnnnnnnnnnnnnnnnnnnnnnnnnnnnnnnnnnnnnnnnnnnnnnnnnnnnnnnnnnnnnnnnnnnnnnnnnnnnnnnnnnnnnnnnnnnnnnnnnnnnnnnnnnnnnnnnnnnnnnnnnnnnnnnnnnnnnnnnnnnnnnnnnnnnnnnnnnnnnnnnnnnnnnnnnnnnnnnnnnnnnnnnnnnnnnnnnnnnnnnnnnnnnnnnnnnnnnnnnnnnnnnnnnnnnnnnnnnnnnnnnnnnnnnnnnnnnnnnnnnnnnnnnnnnnnnnnnnnnnnnnnnnnnnnnnnnnnnnnnnnnnnnnnnnnnnnnnnnnnnnnnnnnnnnnnnnnnnnnnnnnnnnnnnnnnnnnnnnnnnnnnnnnnnnnnnnnnnnnnnnnnnnnnnnnnnnnnnnnnnnnnnnnnnnnnnnnnnnnnnnnnnnnnnnnnnnnnnnnnnnnnnnnnnnnnnnnnnnnnnnnnnnnnnnnnnnnnnnnnnnnnnnnnnnnnnnnnnnnnnnnnnnnnnnnnnnnnnnnnnnnnnnnnnnnnnnnnnnnnnnnnnnnnnnnnnnnnnnnnnnnnnnnnnnnnnnnnnnnnnnnnnnnnnnnnnnnnnnnnnnnnnnnnnnnnnnnnnnnnnnnnnnnnnnnnnnnnnnnnnnnnnnnnnnnnnnnnnnnnnnnnnnnnnnnnnnnnnnnnnnnnnnnnnnnnnnnnnnnnnnnnnnnnnnnnnnnnnnnnnnnnnnnnnnnnnnnnnnnnnnnnnnnnnnnnnnnnnnnnnnnnnnnnnnnnnnnnnnnnnnnnnnnnnnnnnnnnnnnnnnnnnnnnnnnnnnnnnnnnnnnnnnnnnnnnnnnnnnnnnnnnnnnnnnnnnnnnnnnnnnnnnnnnnnnnnnnnnnnnnnnnnnnnnnnnnnnnnnnnnnnnnnnnnnnnnnnnnnnnnnnnnnnnnnnnnnnnnnnnnnnnnnnnnnnnnnnnnnnnnnnnnnnnnnnnnnnnnnnnnnnnnnnnnnnnnnnnnnnnnnnnnnnnnnnnnnnnnnnnnnnnnnnnnnnnnnnnnnnnnnnnnnnnnnnnnnnnnnnnnnnnnnnnnnnnnnnnnnnnnnnnnnnnnnnnnnnnnnnnnnnnnnnnnnnnnnnnnnnnnnnnnnnnnnnnnnnnnnnnnnnnnnnnnnnnnnnnnnnnnnnnnnnnnnnnnnnnnnnnnnnnnnnnnnnnnnnnnnnnnnnnnnnnnnnnnnnnnnnnnnnnnnnnnnnnnnnnnnnnnnnnnnnnnnnnnnnnnnnnnnnnnnnnnnnnnnnnnnnnnnnnnnnnnnnnnnnnnnnnnnnnnnnnnnnnnnnnnnnnnnnnnnnnnnnnnnnnnnnnnnnnnnnnnnnnnnnnnnnnnnnnnnnnnnnnnnnnnnnnnnnnnnnnnnnnnnnnnnnnnnnnnnnnnnnnnnnnnnnnnnnnnnnnnnnnnnnnnnnnnnnnnnnnnnnnnnnnnnnnnnnnnnnnnnnnnnnnnnnnnnnnnnnnnnnnnnnnnnnnnnnnnnnnnnnnnnnnnnnnnnnnnnnnnnnnnnnnnnnnnnnnnnnnnnnnnnnnnnnnnnnnnnnnnnnnnnnnnnnnnnnnnnnnnnnnnnnnnnnnnnnnnnnnnnnnnnnnnnnnnnnnnnnnnnnnnnnnnnnnnnnnnnnnnnnnnnnnnnnnnnnnnnnnnnnnnnnnnnnnnnnnnnnnnnnnnnnnnnnnnnnnnnnnnnnnnnnnnnnnnnnnnnnnnnnnnnnnnnnnnnnnnnnnnnnnnnnnnnnnnnnnnnnnnnnnnnnnnnnnnnnnnnnnnnnnnnnnnnnnnnnnnnnnnnnnnnnnnnnnnnnnnnnnnnnnnnnnnnnnnnnnnnnnnnnnnnnnnnnnnnnnnnnnnnnnnnnnnnnnnnnnnnnnnnnnnnnnnnnnnnnnnnnnnnnnnnnnnnnnnnnnnnnnnnnnnnnnnnnnnnnnnnnnnnnnnnnnnnnnnnnnnnnnnnnnnnnnnnnnnnnnnnnnnnnnnnnnnnnnnnnnnnnnnnnnnnnnnnnnnnnnnnnnnnnnnnnnnnnnnnnnnnnnnnnnnnnnnnnnnnnnnnnnnnnnnnnnnnnnnnnnnnnnnnnnnnnnnnnnnnnnnnnnnnnnnnnnnnnnnnnnnnnnnnnnnnnnnnnnnnnnnnnnnnnnnnnnnnnnnnnnnnnnnnnnnnnnnnnnnnnnnnnnnnnnnnnnnnnnnnnnnnnnnnnnnnnnnnnnnnnnnnnnnnnnnnnnnnnnnnnnnnnnnnnnnnnnnnnnnnnnnnnnnnnnnnnnnnnnnnnnnnnnnnnnnnnnnnnnnnnnnnnnnnnnnnnnnnnnnnnnnnnnnnnnnnnnnnnnnnnnnnnnnnnnnnnnnnnnnnnnnnnnnnnnnnnnnnnnnnnnnnnnnnnnnnnnnnnnnnnnnnnnnnnnnnnnnnnnnnnnnnnnnnnnnnnnnnnnnnnnnnnnnnnnnnnnnnnnnnnnnnnnnnnnnnnnnnnnnnnnnnnnnnnnnnnnnnnnnnnnnnnnnnnnnnnnnnnnnnnnnnnnnnnnnnnnnnnnnnnnnnnnnnnnnnnnnnnnnnnnnnnnnnnnnnnnnnnnnnnnnnnnnnnnnnnnnnnnnnnnnnnnnnnnnnnnnnnnnnnnnnnnnnnnnnnnnnnnnnnnnnnnnnnnnnnnnnnnnnnnnnnnnnnnnnnnnnnnnnnnnnnnnnnnnnnnnnnnnnnnnnnnnnnnnnnnnnnnnnnnnnnnnnnnnnnnnnnnnnnnnnnnnnnnnnnnnnnnnnnnnnnnnnnnnnnnnnnnnnnnnnnnnnnnnnnnnnnnnnnnnnnnnnnnnnnnnnnnnnnnnnnnnnnnnnnnnnnnnnnnnnnnnnnnnnnnnnnnnnnnnnnnnnnnnnnnnnnnnnnnnnnnnnnnnnnnnnnnnnnnnnnnnnnnnnnnnnnnnnnnnnnnnnnnnnnnnnnnnnnnnnnnnnnnnnnnnnnnnnnnnnnnnnnnnnnnnnnnnnnnnnnnnnnnnnnnnnnnnnnnnnnnnnnnnnnnnnnnnnnnnnnnnnnnnnnnnnnnnnnnnnnnnnnnnnnnnnnnnnnnnnnnnnnnnnnnnnnnnnnnnnnnnnnnnnnnnnnnnnnnnnnnnnnnnnnnnnnnnnnnnnnnnnnnnnnnnnnnnnnnnnnnnnnnnnnnnnnnnnnnnnnnnnnnnnnnnnnnnnnnnnnnnnnnnnnnnnnnnnnnnnnnnnnnnnnnnnnnnnnnnnnnnnnnnnnnnnnnnnnnnnnnnnnnnnnnnnnnnnnnnnnnnnnnnnnnnnnnnnnnnnnnnnnnnnnnnnnnnnnnnnnnnnnnnnnnnnnnnnnnnnnnnnnnnnnnnnnnnnnnnnnnnnnnnnnnnnnnnnnnnnnnnnnnnnnnnnnnnnnnnnnnnnnnnnnnnnnnnnnnnnnnnnnnnnnnnnnnnnnnnnnnnnnnnnnnnnnnnnnnnnnnnnnnnnnnnnnnnnnnnnnnnnnnnnnnnnnnnnnnnnnnnnnnnnnnnnnnnnnnnnnnnnnnnnnnnnnnnnnnnnnnnnnnnnnnnnnnnnnnnnnnnnnnnnnnnnnnnnnnnnnnnnnnnnnnnnnnnnnnnnnnnnnnnnnnnnnnnnnnnnnnnnnnnnnnnnnnnnnnnnnnnnnnnnnnnnnnnnnnnnnnnnnnnnnnnnnnnnnnnnnnnnnnnnnnnnnnnnnnnnnnnnnnnnnnnnnnnnnnnnnnnnnnnnnnnnnnnnnnnnnnnnnnnnnnnnnnnnnnnnnnnnnnnnnnnnnnnnnnnnnnnnnnnnnnnnnnnnnnnnnnnnnnnnnnnnnnnnnnnnnnnnnnnnnnnnnnnnnnnnnnnnnnnnnnnnnnnnnnnnnnnnnnnnnnnnnnnnnnnnnnnnnnnnnnnnnnnnnnnnnnnnnnnnnnnnnnnnnnnnnnnnnnnnnnnnnnnnnnnnnnnnnnnnnnnnnnnnnnnnnnnnnnnnnnnnnnnnnnnnnnnnnnnnnnnnnnnnnnnnnnnnnnnnnnnnnnnnnnnnnnnnnnnnnnnnnnnnnnnnnnnnnnnnnnnnnnnnnnnnnnnnnnnnnnnnnnnnnnnnnnnnnnnnnnnnnnnnnnnnnnnnnnnnnnnnnnnnnnnnnnnnnnnnnnnnnnnnnnnnnnnnnnnnnnnnnnnnnnnnnnnnnnnnnnnnnnnnnnnnnnnnnnnnnnnnnnnnnnnnnnnnnnnnnnnnnnnnnnnnnnnnnnnnnnnnnnnnnnnnnnnnnnnnnnnnnnnnnnnnnnnnnnnnnnnnnnnnnnnnnnnnnnnnnnnnnnnnnnnnnnnnnnnnnnnnnnnnnnnnnnnnnnnnnnnnnnnnnnnnnnnnnnnnnnnnnnnnnnnnnnnnnnnnnnnnnnnnnnnnnnnnnnnnnnnnnnnnnnnnnnnnnnnnnnnnnnnnnnnnnnnnnnnnnnnnnnnnnnnnnnnnnnnnnnnnnnnnnnnnnnnnnnnnnnnnnnnnnnnnnnnnnnnnnnnnnnnnnnnnnnnnnnnnnnnnnnnnnnnnnnnnnnnnnnnnnnnnnnnnnnnnnnnnnnnnnnnnnnnnnnnnnnnnnnnnnnnnnnnnnnnnnnnnnnnnnnnnnnnnnnnnnnnnnnnnnnnnnnnnnnnnnnnnnnnnnnnnnnnnnnnnnnnnnnnnnnnnnnnnnnnnnnnnnnnnnnnnnnnnnnnnnnnnnnnnnnnnnnnnnnnnnnnnnnnnnnnnnnnnnnnnnnnnnnnnnnnnnnnnnnnnnnnnnnnnnnnnnnnnnnnnnnnnnnnnnnnnnnnnnnnnnnnnnnnnnnnnnnnnnnnnnnnnnnnnnnnnnnnnnnnnnnnnnnnnnnnnnnnnnnnnnnnnnnnnnnnnnnnnnnnnnnnnnnnnnnnnnnnnnnnnnnnnnnnnnnnnnnnnnnnnnnnnnnnnnnnnnnnnnnnnnnnnnnnnnnnnnnnnnnnnnnnnnnnnnnnnnnnnnnnnnnnnnnnnnnnnnnnnnnnnnnnnnnnnnnnnnnnnnnnnnnnnnnnnnnnnnnnnnnnnnnnnnnnnnnnnnnnnnnnnnnnnnnnnnnnnnnnnnnnnnnnnnnnnnnnnnnnnnnnnnnnnnnnnnnnnnnnnnnnnnnnnnnnnnnnnnnnnnnnnnnnnnnnnnnnnnnnnnnnnnnnnnnnnnnnnnnnnnnnnnnnnnnnnnnnnnnnnnnnnnnnnnnnnnnnnnnnnnnnnnnnnnnnnnnnnnnnnnnnnnnnnnnnnnnnnnnnnnnnnnnnnnnnnnnnnnnnnnnnnnnnnnnnnnnnnnnnnnnnnnnnnnnnnnnnnnnnnnnnnnnnnnnnnnnnnnnnnnnnnnnnnnnnnnnnnnnnnnnnnnnnnnnnnnnnnnnnnnnnnnnnnnnnnnnnnnnnnnnnnnnnnnnnnnnnnnnnnnnnnnnnnnnnnnnnnnnnnnnnnnnnnnnnnnnnnnnnnnnnnnnnnnnnnnnnnnnnnnnnnnnnnnnnnnnnnnnnnnnnnnnnnnnnnnnnnnnnnnnnnnnnnnnnnnnnnnnnnnnnnnnnnnnnnnnnnnnnnnnnnnnnnnnnnnnnnnnnnnnnnnnnnnnnnnnnnnnnnnnnnnnnnnnnnnnnnnnnnnnnnnnnnnnnnnnnnnnnnnnnnnnnnnnnnnnnnnnnnnnnnnnnnnnnnnnnnnnnnnnnnnnnnnnnnnnnnnnnnnnnnnnnnnnnnnnnnnnnnnnnnnnnnnnnnnnnnnnnnnnnnnnnnnnnnnnnnnnnnnnnnnnnnnnnnnnnnnnnnnnnnnnnnnnnnnnnnnnnnnnnnnnnnnnnnnnnnnnnnnnnnnnnnnnnnnnnnnnnnnnnnnnnnnnnnnnnnnnnnnnnnnnnnnnnnnnnnnnnnnnnnnnnnnnnnnnnnnnnnnnnnnnnnnnnnnnnnnnnnnnnnnnnnnnnnnnnnnnnnnnnnnnnnnnnnnnnnnnnnnnnnnnnnnnnnnnnnnnnnnnnnnnnnnnnnnnnnnnnnnnnnnnnnnnnnnnnnnnnnnnnnnnnnnnnnnnnnnnnnnnnnnnnnnnnnnnnnnnnnnnnnnnnnnnnnnnnnnnnnnnnnnnnnnnnnnnnnnnnnnnnnnnnnnnnnnnnnnnnnnnnnnnnnnnnnnnnnnnnnnnnnnnnnnnnnnnnnnnnnnnnnnnnnnnnnnnnnnnnnnnnnnnnnnnnnnnnnnnnnnnnnnnnnnnnnnnnnnnnnnnnnnnnnnnnnnnnnnnnnnnnnnnnnnnnnnnnnnnnnnnnnnnnnnnnnnnnnnnnnnnnnnnnnnnnnnnnnnnnnnnnnnnnnnnnnnnnnnnnnnnnnnnnnnnnnnnnnnnnnnnnnnnnnnnnnnnnnnnnnnnnnnnnnnnnnnnnnnnnnnnnnnnnnnnnnnnnnnnnnnnnnnnnnnnnnnnnnnnnnnnnnnnnnnnnnnnnnnnnnnnnnnnnnnnnnnnnnnnnnnnnnnnnnnnnnnnnnnnnnnnnnnnnnnnnnnnnnnnnnnnnnnnnnnnnnnnnnnnnnnnnnnnnnnnnnnnnnnnnnnnnnnnnnnnnnnnnnnnnnnnnnnnnnnnnnnnnnnnnnnnnnnnnnnnnnnnnnnnnnnnnnnnnnnnnnnnnnnnnnnnnnnnnnnnnnnnnnnnnnnnnnnnnnnnnnnnnnnnnnnnnnnnnnnnnnnnnnnnnnnnnnnnnnnnnnnnnnnnnnnnnnnnnnnnnnnnnnnnnnnnnnnnnnnnnnnnnnnnnnnnnnnnnnnnnnnnnnnnnnnnnnnnnnnnnnnnnnnnnnnnnnnnnnnnnnnnnnnnnnnnnnnnnnnnnnnnnnnnnnnnnnnnnnnnnnnnnnnnnnnnnnnnnnnnnnnnnnnnnnnnnnnnnnnnnnnnnnnnnnnnnnnnnnnnnnnnnnnnnnnnnnnnnnnnnnnnnnnnnnnnnnnnnnnnnnnnnnnnnnnnnnnnnnnnnnnnnnnnnnnnnnnnnnnnnnnnnnnnnnnnnnnnnnnnnnnnnnnnnnnnnnnnnnnnnnnnnnnnnnnnnnnnnnnnnnnnnnnnnnnnnnnnnnnnnnnnnnnnnnnnnnnnnnnnnnnnnnnnnnnnnnnnnnnnnnnnnnnnnnnnnnnnnnnnnnnnnnnnnnnnnnnnnnnnnnnnnnnnnnnnnnnnnnnnnnnnnnnnnnnnnnnnnnnnnnnnnnnnnnnnnnnnnnnnnnnnnnnnnnnnnnnnnnnnnnnnnnnnnnnnnnnnnnnnnnnnnnnnnnnnnnnnnnnnnnnnnnnnnnnnnnnnnnnnnnnnnnnnnnnnnnnnnnnnnnnnnnnnnnnnnnnnnnnnnnnnnnnnnnnnnnnnnnnnnnnnnnnnnnnnnnnnnnnnnnnnnnnnnnnnnnnnnnnnnnnnnnnnnnnnnnnnnnnnnnnnnnnnnnnnnnnnnnnnnnnnnnnnnnnnnnnnnnnnnnnnnnnnnnnnnnnnnnnnnnnnnnnnnnnnnnnnnnnnnnnnnnnnnnnnnnnnnnnnnnnnnnnnnnnnnnnnnnnnnnnnnnnnnnnnnnnnnnnnnnnnnnnnnnnnnnnnnnnnnnnnnnnnnnnnnnnnnnnnnnnnnnnnnnnnnnnnnnnnnnnnnnnnnnnnnnnnnnnnnnnnnnnnnnnnnnnnnnnnnnnnnnnnnnnnnnnnnnnnnnnnnnnnnnnnnnnnnnnnnnnnnnnnnnnnnnnnnnnnnnnnnnnnnnnnnnnnnnnnnnnnnnnnnnnnnnnnnnnnnnnnnnnnnnnnnnnnnnnnnnnnnnnnnnnnnnnnnnnnnnnnnnnnnnnnnnnnnnnnnnnnnnnnnnnnnnnnnnnnnnnnnnnnnnnnnnnnnnnnnnnnnnnnnnnnnnnnnnnnnnnnnnnnnnnnnnnnnnnnnnnnnnnnnnnnnnnnnnnnnnnnnnnnnnnnnnnnnnnnnnnnnnnnnnnnnnnnnnnnnnnnnnnnnnnnnnnnnnnnnnnnnnnnnnnnnnnnnnnnnnnnnnnnnnnnnnnnnnnnnnnnnnnnnnnnnnnnnnnnnnnnnnnnnnnnnnnnnnnnnnnnnnnnnnnnnnnnnnnnnnnnnnnnnnnnnnnnnnnnnnnnnnnnnnnnnnnnnnnnnnnnnnnnnnnnnnnnnnnnnnnnnnnnnnnnnnnnnnnnnnnnnnnnnnnnnnnnnnnnnnnnnnnnnnnnnnnnnnnnnnnnnnnnnnnnnnnnnnnnnnnnnnnnnnnnnnnnnnnnnnnnnnnnnnnnnnnnnnnnnnnnnnnnnnnnnnnnnnnnnnnnnnnnnnnnnnnnnnnnnnnnnnnnnnnnnnnnnnnnnnnnnnnnnnnnnnnnnnnnnnnnnnnnnnnnnnnnnnnnnnnnnnnnnnnnnnnnnnnnnnnnnnnnnnnnnnnnnnnnnnnnnnnnnnnnnnnnnnnnnnnnnnnnnnnnnnnnnnnnnnnnnnnnnnnnnnnnnnnnnnnnnnnnnnnnnnnnnnnnnnnnnnnnnnnnnnnnnnnnnnnnnnnnnnnnnnnnnnnnnnnnnnnnnnnnnnnnnnnnnnnnnnnnnnnnnnnnnnnnnnnnnnnnnnnnnnnnnnnnnnnnnnnnnnnnnnnnnnnnnnnnnnnnnnnnnnnnnnnnnnnnnnnnnnnnnnnnnnnnnnnnnnnnnnnnnnnnnnnnnnnnnnnnnnnnnnnnnnnnnnnnnnnnnnnnnnnnnnnnnnnnnnnnnnnnnnnnnnnnnnnnnnnnnnnnnnnnnnnnnnnnnnnnnnnnnnnnnnnnnnnnnnnnnnnnnnnnnnnnnnnnnnnnnnnnnnnnnnnnnnnnnnnnnnnnnnnnnnnnnnnnnnnnnnnnnnnnnnnnnnnnnnnnnnnnnnnnnnnnnnnnnnnnnnnnnnnnnnnnnnnnnnnnnnnnnnnnnnnnnnnnnnnnnnnnnnnnnnnnnnnnnnnnnnnnnnnnnnnnnnnnnnnnnnnnnnnnnnnnnnnnnnnnnnnnnnnnnnnnnnnnnnnnnnnnnnnnnnnnnnnnnnnnnnnnnnnnnnnnnnnnnnnnnnnnnnnnnnnnnnnnnnnnnnnnnnnnnnnnnnnnnnnnnnnnnnnnnnnnnnnnnnnnnnnnnnnnnnnnnnnnnnnnnnnnnnnnnnnnnnnnnnnnnnnnnnnnnnnnnnnnnnnnnnnnnnnnnnnnnnnnnnnnnnnnnnnnnnnnnnnnnnnnnnnnnnnnnnnnnnnnnnnnnnnnnnnnnnnnnnnnnnnnnnnnnnnnnnnnnnnnnnnnnnnnnnnnnnnnnnnnnnnnnnnnnnnnnnnnnnnnnnnnnnnnnnnnnnnnnnnnnnnnnnnnnnnnnnnnnnnnnnnnnnnnnnnnnnnnnnnnnnnnnnnnnnnnnnnnnnnnnnnnnnnnnnnnnnnnnnnnnnnnnnnnnnnnnnnnnnnnnnnnnnnnnnnnnnnnnnnnnnnnnnnnnnnnnnnnnnnnnnnnnnnnnnnnnnnnnnnnnnnnnnnnnnnnnnnnnnnnnnnnnnnnnnnnnnnnnnnnnnnnnnnnnnnnnnnnnnnnnnnnnnnnnnnnnnnnnnnnnnnnnnnnnnnnnnnnnnnnnnnnnnnnnnnnnnnnnnnnnnnnnnnnnnnnnnnnnnnnnnnnnnnnnnnnnnnnnnnnnnnnnnnnnnnnnnnnnnnnnnnnnnnnnnnnnnnnnnnnnnnnnnnnnnnnnnnnnnnnnnnnnnnnnnnnnnnnnnnnnnnnnnnnnnnnnnnnnnnnnnnnnnnnnnnnnnnnnnnnnnnnnnnnnnnnnnnnnnnnnnnnnnnnnnnnnnnnnnnnnnnnnnnnnnnnnnnnnnnnnnnnnnnnnnnnnnnnnnnnnnnnnnnnnnnnnnnnnnnnnnnnnnnnnnnnnnnnnnnnnnnnnnnnnnnnnnnnnnnnnnnnnnnnnnnnnnnnnnnnnnnnnnnnnnnnnnnnnnnnnnnnnnnnnnnnnnnnnnnnnnnnnnnnnnnnnnnnnnnnnnnnnnnnnnnnnnnnnnnnnnnnnnnnnnnnnnnnnnnnnnnnnnnnnnnnnnnnnnnnnnnnnnnnnnnnnnnnnnnnnnnnnnnnnnnnnnnnnnnnnnnnnnnnnnnnnnnnnnnnnnnnnnnnnnnnnnnnnnnnnnnnnnnnnnnnnnnnnnnnnnnnnnnnnnnnnnnnnnnnnnnnnnnnnnnnnnnnnnnnnnnnnnnnnnnnnnnnnnnnnnnnnnnnnnnnnnnnnnnnnnnnnnnnnnnnnnnnnnnnnnnnnnnnnnnnnnnnnnnnnnnnnnnnnnnnnnnnnnnnnnnnnnnnnnnnnnnnnnnnnnnnnnnnnnnnnnnnnnnnnnnnnnnnnnnnnnnnnnnnnnnnnnnnnnnnnnnnnnnnnnnnnnnnnnnnnnnnnnnnnnnnnnnnnnnnnnnnnnnnnnnnnnnnnnnnnnnnnnnnnnnnnnnnnnnnnnnnnnnnnnnnnnnnnnnnnnnnnnnnnnnnnnnnnnnnnnnnnnnnnnnnnnnnnnnnnnnnnnnnnnnnnnnnnnnnnnnnnnnnnnnnnnnnnnnnnnnnnnnnnnnnnnnnnnnnnnnnnnnnnnnnnnnnnnnnnnnnnnnnnnnnnnnnnnnnnnnnnnnnnnnnnnnnnnnnnnnnnnnnnnnnnnnnnnnnnnnnnnnnnnnnnnnnnnnnnnnnnnnnnnnnnnnnnnnnnnnnnnnnnnnnnnnnnnnnnnnnnnnnnnnnnnnnnnnnnnnnnnnnnnnnnnnnnnnnnnnnnnnnnnnnnnnnnnnnnnnnnnnnnnnnnnnnnnnnnnnnnnnnnnnnnnnnnnnnnnnnnnnnnnnnnnnnnnnnnnnnnnnnnnnnnnnnnnnnnnnnnnnnnnnnnnnnnnnnnnnnnnnnnnnnnnnnnnnnnnnnnnnnnnnnnnnnnnnnnnnnnnnnnnnnnnnnnnnnnnnnnnnnnnnnnnnnnnnnnnnnnnnnnnnnnnnnnnnnnnnnnnnnnnnnnnnnnnnnnnnnnnnnnnnnnnnnnnnnnnnnnnnnnnnnnnnnnnnnnnnnnnnnnnnnnnnnnnnnnnnnnnnnnnnnnnnnnnnnnnnnnnnnnnnnnnnnnnnnnnnnnnnnnnnnnnnnnnnnnnnnnnnnnnnnnnnnnnnnnnnnnnnnnnnnnnnnnnnnnnnnnnnnnnnnnnnnnnnnnnnnnnnnnnnnnnnnnnnnnnnnnnnnnnnnnnnnnnnnnnnnnnnnnnnnnnnnnnnnnnnnnnnnnnnnnnnnnnnnnnnnnnnnnnnnnnnnnnnnnnnnnnnnnnnnnnnnnnnnnnnnnnnnnnnnnnnnnnnnnnnnnnnnnnnnnnnnnnnnnnnnnnnnnnnnnnnnnnnnnnnnnnnnnnnnnnnnnnnnnnnnnnnnnnnnnnnnnnnnnnnnnnnnnnnnnnnnnnnnnnnnnnnnnnnnnnnnnnnnnnnnnnnnnnnnnnnnnnnnnnnnnnnnnnnnnnnnnnnnnnnnnnnnnnnnnnnnnnnnnnnnnnnnnnnnnnnnnnnnnnnnnnnnnnnnnnnnnnnnnnnnnnnnnnnnnnnnnnnnnnnnnnnnnnnnnnnnnnnnnnnnnnnnnnnnnnnnnnnnnnnnnnnnnnnnnnnnnnnnnnnnnnnnnnnnnnnnnnnnnnnnnnnnnnnnnnnnnnnnnnnnnnnnnnnnnnnnnnnnnnnnnnnnnnnnnnnnnnnnnnnnnnnnnnnnnnnnnnnnnnnnnnnnnnnnnnnnnnnnnnnnnnnnnnnnnnnnnnnnnnnnnnnnnnnnnnnnnnnnnnnnnnnnnnnnnnnnnnnnnnnnnnnnnnnnnnnnnnnnnnnnnnnnnnnnnnnnnnnnnnnnnnnnnnnnnnnnnnnnnnnnnnnnnnnnnnnnnnnnnnnnnnnnnnnnnnnnnnnnnnnnnnnnnnnnnnnnnnnnnnnnnnnnnnnnnnnnnnnnnnnnnnnnnnnnnnnnnnnnnnnnnnnnnnnnnnnnnnnnnnnnnnnnnnnnnnnnnnnnnnnnnnnnnnnnnnnnnnnnnnnnnnnnnnnnnnnnnnnnnnnnnnnnnnnnnnnnnnnnnnnnnnnnnnnnnnnnnnnnnnnnnnnnnnnnnnnnnnnnnnnnnnnnnnnnnnnnnnnnnnnnnnnnnnnnnnnnnnnnnnnnnnnnnnnnnnnnnnnnnnnnnnnnnnnnnnnnnnnnnnnnnnnnnnnnnnnnnnnnnnnnnnnnnnnnnnnnnnnnnnnnnnnnnnnnnnnnnnnnnnnnnnnnnnnnnnnnnnnnnnnnnnnnnnnnnnnnnnnnnnnnnnnnnnnnnnnnnnnnnnnnnnnnnnnnnnnnnnnnnnnnnnnnnnnnnnnnnnnnnnnnnnnnnnnnnnnnnnnnnnnnnnnnnnnnnnnnnnnnnnnnnnnnnnnnnnnnnnnnnnnnnnnnnnnnnnnnnnnnnnnnnnnnnnnnnnnnnnnnnnnnnnnnnnnnnnnnnnnnnnnnnnnnnnnnnnnnnnnnnnnnnnnnnnnnnnnnnnnnnnnnnnnnnnnnnnnnnnnnnnnnnnnnnnnnnnnnnnnnnnnnnnnnnnnnnnnnnnnnnnnnnnnnnnnnnnnnnnnnnnnnnnnnnnnnnnnnnnnnnnnnnnnnnnnnnnnnnnnnnnnnnnnnnnnnnnnnnnnnnnnnnnnnnnnnnnnnnnnnnnnnnnnnnnnnnnnnnnnnnnnnnnnnnnnnnnnnnnnnnnnnnnnnnnnnnnnnnnnnnnnnnnnnnnnnnnnnnnnnnnnnnnnnnnnnnnnnnnnnnnnnnnnnnnnnnnnnnnnnnnnnnnnnnnnnnnnnnnnnnnnnnnnnnnnnnnnnnnnnnnnnnnnnnnnnnnnnnnnnnnnnnnnnnnnnnnnnnnnnnnnnnnnnnnnnnnnnnnnnnnnnnnnnnnnnnnnnnnnnnnnnnnnnnnnnnnnnnnnnnnnnnnnnnnnnnnnnnnnnnnnnnnnnnnnnnnnnnnnnnnnnnnnnnnnnnnnnnnnnnnnnnnnnnnnnnnnnnnnnnnnnnnnnnnnnnnnnnnnnnnnnnnnnnnnnnnnnnnnnnnnnnnnnnnnnnnnnnnnnnnnnnnnnnnnnnnnnnnnnnnnnnnnnnnnnnnnnnnnnnnnnnnnnnnnnnnnnnnnnnnnnnnnnnnnnnnnnnnnnnnnnnnnnnnnnnnnnnnnnnnnnnnnnnnnnnnnnnnnnnnnnnnnnnnnnnnnnnnnnnnnnnnnnnnnnnnnnnnnnnnnnnnnnnnnnnnnnnnnnnnnnnnnnnnnnnnnnnnnnnnnnnnnnnnnnnnnnnnnnnnnnnnnnnnnnnnnnnnnnnnnnnnnnnnnnnnnnnnnnnnnnnnnnnnnnnnnnnnnnnnnnnnnnnnnnnnnnnnnnnnnnnnnnnnnnnnnnnnnnnnnnnnnnnnnnnnnnnnnnnnnnnnnnnnnnnnnnnnnnnnnnnnnnnnnnnnnnnnnnnnnnnnnnnnnnnnnnnnnnnnnnnnnnnnnnnnnnnnnnnnnnnnnnnnnnnnnnnnnnnnnnnnnnnnnnnnnnnnnnnnnnnnnnnnnnnnnnnnnnnnnnnnnnnnnnnnnnnnnnnnnnnnnnnnnnnnnnnnnnnnnnnnnnnnnnnnnnnnnnnnnnnnnnnnnnnnnnnnnnnnnnnnnnnnnnnnnnnnnnnnnnnnnnnnnnnnnnnnnnnnnnnnnnnnnnnnnnnnnnnnnnnnnnnnnnnnnnnnnnnnnnnnnnnnnnnnnnnnnnnnnnnnnnnnnnnnnnnnnnnnnnnnnnnnnnnnnnnnnnnnnnnnnnnnnnnnnnnnnnnnnnnnnnnnnnnnnnnnnnnnnnnnnnnnnnnnnnnnnnnnnnnnnnnnnnnnnnnnnnnnnnnnnnnnnnnnnnnnnnnnnnnnnnnnnnnnnnnnnnnnnnnnnnnnnnnnnnnnnnnnnnnnnnnnnnnnnnnnnnnnnnnnnnnnnnnnnnnnnnnnnnnnnnnnnnnnnnnnnnnnnnnnnnnnnnnnnnnnnnnnnnnnnnnnnnnnnnnnnnnnnnnnnnnnnnnnnnnnnnnnnnnnnnnnnnnnnnnnnnnnnnnnnnnnnnnnnnnnnnnnnnnnnnnnnnnnnnnnnnnnnnnnnnnnnnnnnnnnnnnnnnnnnnnnnnnnnnnnnnnnnnnnnnnnnnnnnnnnnnnnnnnnnnnnnnnnnnnnnnnnnnnnnnnnnnnnnnnnnnnnnnnnnnnnnnnnnnnnnnnnnnnnnnnnnnnnnnnnnnnnnnnnnnnnnnnnnnnnnnnnnnnnnnnnnnnnnnnnnnnnnnnnnnnnnnnnnnnnnnnnnnnnnnnnnnnnnnnnnnnnnnnnnnnnnnnnnnnnnnnnnnnnnnnnnnnnnnnnnnnnnnnnnnnnnnnnnnnnnnnnnnnnnnnnnnnnnnnnnnnnnnnnnnnnnnnnnnnnnnnnnnnnnnnnnnnnnnnnnnnnnnnnnnnnnnnnnnnnnnnnnnnnnnnnnnnnnnnnnnnnnnnnnnnnnnnnnnnnnnnnnnnnnnnnnnnnnnnnnnnnnnnnnnnnnnnnnnnnnnnnnnnnnnnnnnnnnnnnnnnnnnnnnnnnnnnnnnnnnnnnnnnnnnnnnnnnnnnnnnnnnnnnnnnnnnnnnnnnnnnnnnnnnnnnnnnnnnnnnnnnnnnnnnnnnnnnnnnnnnnnnnnnnnnnnnnnnnnnnnnnnnnnnnnnnnnnnnnnnnnnnnnnnnnnnnnnnnnnnnnnnnnnnnnnnnnnnnnnnnnnnnnnnnnnnnnnnnnnnnnnnnnnnnnnnnnnnnnnnnnnnnnnnnnnnnnnnnnnnnnnnnnnnnnnnnnnnnnnnnnnnnnnnnnnnnnnnnnnnnnnnnnnnnnnnnnnnnnnnnnnnnnnnnnnnnnnnnnnnnnnnnnnnnnnnnnnnnnnnnnnnnnnnnnnnnnnnnnnnnnnnnnnnnnnnnnnnnnnnnnnnnnnnnnnnnnnnnnnnnnnnnnnnnnnnnnnnnnnnnnnnnnnnnnnnnnnnnnnnnnnnnnnnnnnnnnnnnnnnnnnnnnnnnnnnnnnnnnnnnnnnnnnnnnnnnnnnnnnnnnnnnnnnnnnnnnnnnnnnnnnnnnnnnnnnnnnnnnnnnnnnnnnnnnnnnnnnnnnnnnnnnnnnnnnnnnnnnnnnnnnnnnnnnnnnnnnnnnnnnnnnnnnnnnnnnnnnnnnnnnnnnnnnnnnnnnnnnnnnnnnnnnnnnnnnnnnnnnnnnnnnnnnnnnnnnnnnnnnnnnnnnnnnnnnnnnnnnnnnnnnnnnnnnnnnnnnnnnnnnnnnnnnnnnnnnnnnnnnnnnnnnnnnnnnnnnnnnnnnnnnnnnnnnnnnnnnnnnnnnnnnnnnnnnnnnnnnnnnnnnnnnnnnnnnnnnnnnnnnnnnnnnnnnnnnnnnnnnnnnnnnnnnnnnnnnnnnnnnnnnnnnnnnnnnnnnnnnnnnnnnnnnnnnnnnnnnnnnnnnnnnnnnnnnnnnnnnnnnnnnnnnnnnnnnnnnnnnnnnnnnnnnnnnnnnnnnnnnnnnnnnnnnnnnnnnnnnnnnnnnnnnnnnnnnnnnnnnnnnnnnnnnnnnnnnnnnnnnnnnnnnnnnnnnnnnnnnnnnnnnnnnnnnnnnnnnnnnnnnnnnnnnnnnnnnnnnnnnnnnnnnnnnnnnnnnnnnnnnnnnnnnnnnnnnnnnnnnnnnnnnnnnnnnnnnnnnnnnnnnnnnnnnnnnnnnnnnnnnnnnnnnnnnnnnnnnnnnnnnnnnnnnnnnnnnnnnnnnnnnnnnnnnnnnnnnnnnnnnnnnnnnnnnnnnnnnnnnnnnnnnnnnnnnnnnnnnnnnnnnnnnnnnnnnnnnnnnnnnnnnnnnnnnnnnnnnnnnnnnnnnnnnnnnnnnnnnnnnnnnnnnnnnnnnnnnnnnnnnnnnnnnnnnnnnnnnnnnnnnnnnnnnnnnnnnnnnnnnnnnnnnnnnnnnnnnnnnnnnnnnnnnnnnnnnnnnnnnnnnnnnnnnnnnnnnnnnnnnnnnnnnnnnnnnnnnnnnnnnnnnnnnnnnnnnnnnnnnnnnnnnnnnnnnnnnnnnnnnnnnnnnnnnnnnnnnnnnnnnnnnnnnnnnnnnnnnnnnnnnnnnnnnnnnnnnnnnnnnnnnnnnnnnnnnnnnnnnnnnnnnnnnnnnnnnnnnnnnnnnnnnnnnnnnnnnnnnnnnnnnnnnnnnnnnnnnnnnnnnnnnnnnnnnnnnnnnnnnnnnnnnnnnnnnnnnnnnnnnnnnnnnnnnnnnnnnnnnnnnnnnnnnnnnnnnnnnnnnnnnnnnnnnnnnnnnnnnnnnnnnnnnnnnnnnnnnnnnnnnnnnnnnnnnnnnnnnnnnnnnnnnnnnnnnnnnnnnnnnnnnnnnnnnnnnnnnnnnnnnnnnnnnnnnnnnnnnnnnnnnnnnnnnnnnnnnnnnnnnnnnnnnnnnnnnnnnnnnnnnnnnnnnnnnnnnnnnnnnnnnnnnnnnnnnnnnnnnnnnnnnnnnnnnnnnnnnnnnnnnnnnnnnnnnnnnnnnnnnnnnnnnnnnnnnnnnnnnnnnnnnnnnnnnnnnnnnnnnnnnnnnnnnnnnnnnnnnnnnnnnnnnnnnnnnnnnnnnnnnnnnnnnnnnnnnnnnnnnnnnnnnnnnnnnnnnnnnnnnnnnnnnnnnnnnnnnnnnnnnnnnnnnnnnnnnnnnnnnnnnnnnnnnnnnnnnnnnnnnnnnnnnnnnnnnnnnnnnnnnnnnnnnnnnnnnnnnnnnnnnnnnnnnnnnnnnnnnnnnnnnnnnnnnnnnnnnnnnnnnnnnnnnnnnnnnnnnnnnnnnnnnnnnnnnnnnnnnnnnnnnnnnnnnnnnnnnnnnnnnnnnnnnnnnnnnnnnnnnnnnnnnnnnnnnnnnnnnnnnnnnnnnnnnnnnnnnnnnnnnnnnnnnnnnnnnnnnnnnnnnnnnnnnnnnnnnnnnnnnnnnnnnnnnnnnnnnnnnnnnnnnnnnnnnnnnnnnnnnnnnnnnnnnnnnnnnnnnnnnnnnnnnnnnnnnnnnnnnnnnnnnnnnnnnnnnnnnnnnnnnnnnnnnnnnnnnnnnnnnnnnnnnnnnnnnnnnnnnnnnnnnnnnnnnnnnnnnnnnnnnnnnnnnnnnnnnnnnnnnnnnnnnnnnnnnnnnnnnnnnnnnnnnnnnnnnnnnnnnnnnnnnnnnnnnnnnnnnnnnnnnnnnnnnnnnnnnnnnnnnnnnnnnnnnnnnnnnnnnnnnnnnnnnnnnnnnnnnnnnnnnnnnnnnnnnnnnnnnnnnnnnnnnnnnnnnnnnnnnnnnnnnnnnnnnnnnnnnnnnnnnnnnnnnnnnnnnnnnnnnnnnnnnnnnnnnnnnnnnnnnnnnnnnnnnnnnnnnnnnnnnnnnnnnnnnnnnnnnnnnnnnnnnnnnnnnnnnnnnnnnnnnnnnnnnnnnnnnnnnnnnnnnnnnnnnnnnnnnnnnnnnnnnnnnnnnnnnnnnnnnnnnnnnnnnnnnnnnnnnnnnnnnnnnnnnnnnnnnnnnnnnnnnnnnnnnnnnnnnnnnnnnnnnnnnnnnnnnnnnnnnnnnnnnnnnnnnnnnnnnnnnnnnnnnnnnnnnnnnnnnnnnnnnnnnnnnnnnnnnnnnnnnnnnnnnnnnnnnnnnnnnnnnnnnnnnnnnnnnnnnnnnnnnnnnnnnnnnnnnnnnnnnnnnnnnnnnnnnnnnnnnnnnnnnnnnnnnnnnnnnnnnnnnnnnnnnnnnnnnnnnnnnnnnnnnnnnnnnnnnnnnnnnnnnnnnnnnnnnnnnnnnnnnnnnnnnnnnnnnnnnnnnnnnnnnnnnnnnnnnnnnnnnnnnnnnnnnnnnnnnnnnnnnnnnnnnnnnnnnnnnnnnnnnnnnnnnnnnnnnnnnnnnnnnnnnnnnnnnnnnnnnnnnnnnnnnnnnnnnnnnnnnnnnnnnnnnnnnnnnnnnnnnnnnnnnnnnnnnnnnnnnnnnnnnnnnnnnnnnnnnnnnnnnnnnnnnnnnnnnnnnnnnnnnnnnnnnnnnnnnnnnnnnnnnnnnnnnnnnnnnnnnnnnnnnnnnnnnnnnnnnnnnnnnnnnnnnnnnnnnnnnnnnnnnnnnnnnnnnnnnnnnnnnnnnnnnnnnnnnnnnnnnnnnnnnnnnnnnnnnnnnnnnnnnnnnnnnnnnnnnnnnnnnnnnnnnnnnnnnnnnnnnnnnnnnnnnnnnnnnnnnnnnnnnnnnnnnnnnnnnnnnnnnnnnnnnnnnnnnnnnnnnnnnnnnnnnnnnnnnnnnnnnnnnnnnnnnnnnnnnnnnnnnnnnnnnnnnnnnnnnnnnnnnnnnnnnnnnnnnnnnnnnnnnnnnnnnnnnnnnnnnnnnnnnnnnnnnnnnnnnnnnnnnnnnnnnnnnnnnnnnnnnnnnnnnnnnnnnnnnnnnnnnnnnnnnnnnnnnnnnnnnnnnnnnnnnnnnnnnnnnnnnnnnnnnnnnnnnnnnnnnnnnnnnnnnnnnnnnnnnnnnnnnnnnnnnnnnnnnnnnnnnnnnnnnnnnnnnnnnnnnnnnnnnnnnnnnnnnnnnnnnnnnnnnnnnnnnnnnnnnnnnnnnnnnnnnnnnnnnnnnnnnnnnnnnnnnnnnnnnnnnnnnnnnnnnnnnnnnnnnnnnnnnnnnnnnnnnnnnnnnnnnnnnnnnnnnnnnnnnnnnnnnnnnnnnnnnnnnnnnnnnnnnnnnnnnnnnnnnnnnnnnnnnnnnnnnnnnnnnnnnnnnnnnnnnnnnnnnnnnnnnnnnnnnnnnnnnnnnnnnnnnnnnnnnnnnnnnnnnnnnnnnnnnnnnnnnnnnnnnnnnnnnnnnnnnnnnnnnnnnnnnnnnnnnnnnnnnnnnnnnnnnnnnnnnnnnnnnnnnnnnnnnnnnnnnnnnnnnnnnnnnnnnnnnnnnnnnnnnnnnnnnnnnnnnnnnnnnnnnnnnnnnnnnnnnnnnnnnnnnnnnnnnnnnnnnnnnnnnnnnnnnnnnnnnnnnnnnnnnnnnnnnnnnnnnnnnnnnnnnnnnnnnnnnnnnnnnnnnnnnnnnnnnnnnnnnnnnnnnnnnnnnnnnnnnnnnnnnnnnnnnnnnnnnnnnnnnnnnnnnnnnnnnnnnnnnnnnnnnnnnnnnnnnnnnnnnnnnnnnnnnnnnnnnnnnnnnnnnnnnnnnnnnnnnnnnnnnnnnnnnnnnnnnnnnnnnnnnnnnnnnnnnnnnnnnnnnnnnnnnnnnnnnnnnnnnnnnnnnnnnnnnnnnnnnnnnnnnnnnnnnnnnnnnnnnnnnnnnnnnnnnnnnnnnnnnnnnnnnnnnnnnnnnnnnnnnnnnnnnnnnnnnnnnnnnnnnnnnnnnnnnnnnnnnnnnnnnnnnnnnnnnnnnnnnnnnnnnnnnnnnnnnnnnnnnnnnnnnnnnnnnnnnnnnnnnnnnnnnnnnnnnnnnnnnnnnnnnnnnnnnnnnnnnnnnnnnnnnnnnnnnnnnnnnnnnnnnnnnnnnnnnnnnnnnnnnnnnnnnnnnnnnnnnnnnnnnnnnnnnnnnnnnnnnnnnnnnnnnnnnnnnnnnnnnnnnnnnnnnnnnnnnnnnnnnnnnnnnnnnnnnnnnnnnnnnnnnnnnnnnnnnnnnnnnnnnnnnnnnnnnnnnnnnnnnnnnnnnnnnnnnnnnnnnnnnnnnnnnnnnnnnnnnnnnnnnnnnnnnnnnnnnnnnnnnnnnnnnnnnnnnnnnnnnnnnnnnnnnnnnnnnnnnnnnnnnnnnnnnnnnnnnnnnnnnnnnnnnnnnnnnnnnnnnnnnnnnnnnnnnnnnnnnnnnnnnnnnnnnnnnnnnnnnnnnnnnnnnnnnnnnnnnnnnnnnnnnnnnnnnnnnnnnnnnnnnnnnnnnnnnnnnnnnnnnnnnnnnnnnnnnnnnnnnnnnnnnnnnnnnnnnnnnnnnnnnnnnnnnnnnnnnnnnnnnnnnnnnnnnnnnnnnnnnnnnnnnnnnnnnnnnnnnnnnnnnnnnnnnnnnnnnnnnnnnnnnnnnnnnnnnnnnnnnnnnnnnnnnnnnnnnnnnnnnnnnnnnnnnnnnnnnnnnnnnnnnnnnnnnnnnnnnnnnnnnnnnnnnnnnnnnnnnnnnnnnnnnnnnnnnnnnnnnnnnnnnnnnnnnnnnnnnnnnnnnnnnnnnnnnnnnnnnnnnnnnnnnnnnnnnnnnnnnnnnnnnnnnnnnnnnnnnnnnnnnnnnnnnnnnnnnnnnnnnnnnnnnnnnnnnnnnnnnnnnnnnnnnnnnnnnnnnnnnnnnnnnnnnnnnnnnnnnnnnnnnnnnnnnnnnnnnnnnnnnnnnnnnnnnnnnnnnnnnnnnnnnnnnnnnnnnnnnnnnnnnnnnnnnnnnnnnnnnnnnnnnnnnnnnnnnnnnnnnnnnnnnnnnnnnnnnnnnnnnnnnnnnnnnnnnnnnnnnnnnnnnnnnnnnnnnnnnnnnnnnnnnnnnnnnnnnnnnnnnnnnnnnnnnnnnnnnnnnnnnnnnnnnnnnnnnnnnnnnnnnnnnnnnnnnnnnnnnnnnnnnnnnnnnnnnnnnnnnnnnnnnnnnnnnnnnnnnnnnnnnnnnnnnnnnnnnnnnnnnnnnnnnnnnnnnnnnnnnnnnnnnnnnnnnnnnnnnnnnnnnnnnnnnnnnnnnnnnnnnnnnnnnnnnnnnnnnnnnnnnnnnnnnnnnnnnnnnnnnnnnnnnnnnnnnnnnnnnnnnnnnnnnnnnnnnnnnnnnnnnnnnnnnnnnnnnnnnnnnnnnnnnnnnnnnnnnnnnnnnnnnnnnnnnnnnnnnnnnnnnnnnnnnnnnnnnnnnnnnnnnnnnnnnnnnnnnnnnnnnnnnnnnnnnnnnnnnnnnnnnnnnnnnnnnnnnnnnnnnnnnnnnnnnnnnnnnnnnnnnnnnnnnnnnnnnnnnnnnnnnnnnnnnnnnnnnnnnnnnnnnnnnnnnnnnnnnnnnnnnnnnnnnnnnnnnnnnnnnnnnnnnnnnnnnnnnnnnnnnnnnnnnnnnnnnnnnnnnnnnnnnnnnnnnnnnnnnnnnnnnnnnnnnnnnnnnnnnnnnnnnnnnnnnnnnnnnnnnnnnnnnnnnnnnnnnnnnnnnnnnnnnnnnnnnnnnnnnnnnnnnnnnnnnnnnnnnnnnnnnnnnnnnnnnnnnnnnnnnnnnnnnnnnnnnnnnnnnnnnnnnnnnnnnnnnnnnnnnnnnnnnnnnnnnnnnnnnnnnnnnnnnnnnnnnnnnnnnnnnnnnnnnnnnnnnnnnnnnnnnnnnnnnnnnnnnnnnnnnnnnnnnnnnnnnnnnnnnnnnnnnnnnnnnnnnnnnnnnnnnnnnnnnnnnnnnnnnnnnnnnnnnnnnnnnnnnnnnnnnnnnnnnnnnnnnnnnnnnnnnnnnnnnnnnnnnnnnnnnnnnnnnnnnnnnnnnnnnnnnnnnnnnnnnnnnnnnnnnnnnnnnnnnnnnnnnnnnnnnnnnnnnnnnnnnnnnnnnnnnnnnnnnnnnnnnnnnnnnnnnnnnnnnnnnnnnnnnnnnnnnnnnnnnnnnnnnnnnnnnnnnnnnnnnnnnnnnnnnnnnnnnnnnnnnnnnnnnnnnnnnnnnnnnnnnnnnnnnnnnnnnnnnnnnnnnnnnnnnnnnnnnnnnnnnnnnnnnnnnnnnnnnnnnnnnnnnnnnnnnnnnnnnnnnnnnnnnnnnnnnnnnnnnnnnnnnnnnnnnnnnnnnnnnnnnnnnnnnnnnnnnnnnnnnnnnnnnnnnnnnnnnnnnnnnnnnnnnnnnnnnnnnnnnnnnnnnnnnnnnnnnnnnnnnnnnnnnnnnnnnnnnnnnnnnnnnnnnnnnnnnnnnnnnnnnnnnnnnnnnnnnnnnnnnnnnnnnnnnnnnnnnnnnnnnnnnnnnnnnnnnnnnnnnnnnnnnnnnnnnnnnnnnnnnnnnnnnnnnnnnnnnnnnnnnnnnnnnnnnnnnnnnnnnnnnnnnnnnnnnnnnnnnnnnnnnnnnnnnnnnnnnnnnnnnnnnnnnnnnnnnnnnnnnnnnnnnnnnnnnnnnnnnnnnnnnnnnnnnnnnnnnnnnnnnnnnnnnnnnnnnnnnnnnnnnnnnnnnnnnnnnnnnnnnnnnnnnnnnnnnnnnnnnnnnnnnnnnnnnnnnnnnnnnnnnnnnnnnnnnnnnnnnnnnnnnnnnnnnnnnnnnnnnnnnnnnnnnnnnnnnnnnnnnnnnnnnnnnnnnnnnnnnnnnnnnnnnnnnnnnnnnnnnnnnnnnnnnnnnnnnnnnnnnnnnnnnnnnnnnnnnnnnnnnnnnnnnnnnnnnnnnnnnnnnnnnnnnnnnnnnnnnnnnnnnnnnnnnnnnnnnnnnnnnnnnnnnnnnnnnnnnnnnnnnnnnnnnnnnnnnnnnnnnnnnnnnnnnnnnnnnnnnnnnnnnnnnnnnnnnnnnnnnnnnnnnnnnnnnnnnnnnnnnnnnnnnnnnnnnnnnnnnnnnnnnnnnnnnnnnnnnnnnnnnnnnnnnnnnnnnnnnnnnnnnnnnnnnnnnnnnnnnnnnnnnnnnnnnnnnnnnnnnnnnnnnnnnnnnnnnnnnnnnnnnnnnnnnnnnnnnnnnnnnnnnnnnnnnnnnnnnnnnnnnnnnnnnnnnnnnnnnnnnnnnnnnnnnnnnnnnnnnnnnnnnnnnnnnnnnnnnnnnnnnnnnnnnnnnnnnnnnnnnnnnnnnnnnnnnnnnnnnnnnnnnnnnnnnnnnnnnnnnnnnnnnnnnnnnnnnnnnnnnnnnnnnnnnnnnnnnnnnnnnnnnnnnnnnnnnnnnnnnnnnnnnnnnnnnnnnnnnnnnnnnnnnnnnnnnnnnnnnnnnnnnnnnnnnnnnnnnnnnnnnnnnnnnnnnnnnnnnnnnnnnnnnnnnnnnnnnnnnnnnnnnnnnnnnnnnnnnnnnnnnnnnnnnnnnnnnnnnnnnnnnnnnnnnnnnnnnnnnnnnnnnnnnnnnnnnnnnnnnnnnnnnnnnnnnnnnnnnnnnnnnnnnnnnnnnnnnnnnnnnnnnnnnnnnnnnnnnnnnnnnnnnnnnnnnnnnnnnnnnnnnnnnnnnnnnnnnnnnnnnnnnnnnnnnnnnnnnnnnnnnnnnnnnnnnnnnnnnnnnnnnnnnnnnnnnnnnnnnnnnnnnnnnnnnnnnnnnnnnnnnnnnnnnnnnnnnnnnnnnnnnnnnnnnnnnnnnnnnnnnnnnnnnnnnnnnnnnnnnnnnnnnnnnnnnnnnnnnnnnnnnnnnnnnnnnnnnnnnnnnnnnnnnnnnnnnnnnnnnnnnnnnnnnnnnnnnnnnnnnnnnnnnnnnnnnnnnnnnnnnnnnnnnnnnnnnnnnnnnnnnnnnnnnnnnnnnnnnnnnnnnnnnnnnnnnnnnnnnnnnnnnnnnnnnnnnnnnnnnnnnnnnnnnnnnnnnnnnnnnnnnnnnnnnnnnnnnnnnnnnnnnnnnnnnnnnnnnnnnnnnnnnnnnnnnnnnnnnnnnnnnnnnnnnnnnnnnnnnnnnnnnnnnnnnnnnnnnnnnnnnnnnnnnnnnnnnnnnnnnnnnnnnnnnnnnnnnnnnnnnnnnnnnnnnnnnnnnnnnnnnnnnnnnnnnnnnnnnnnnnnnnnnnnnnnnnnnnnnnnnnnnnnnnnnnnnnnnnnnnnnnnnnnnnnnnnnnnnnnnnnnnnnnnnnnnnnnnnnnnnnnnnnnnnnnnnnnnnnnnnnnnnnnnnnnnnnnnnnnnnnnnnnnnnnnnnnnnnnnnnnnnnnnnnnnnnnnnnnnnnnnnnnnnnnnnnnnnnnnnnnnnnnnnnnnnnnnnnnnnnnnnnnnnnnnnnnnnnnnnnnnnnnnnnnnnnnnnnnnnnnnnnnnnnnnnnnnnnnnnnnnnnnnnnnnnnnnnnnnnnnnnnnnnnnnnnnnnnnnnnnnnnnnnnnnnnnnnnnnnnnnnnnnnnnnnnnnnnnnnnnnnnnnnnnnnnnnnnnnnnnnnnnnnnnnnnnnnnnnnnnnnnnnnnnnnnnnnnnnnnnnnnnnnnnnnnnnnnnnnnnnnnnnnnnnnnnnnnnnnnnnnnnnnnnnnnnnnnnnnnnnnnnnnnnnnnnnnnnnnnnnnnnnnnnnnnnnnnnnnnnnnnnnnnnnnnnnnnnnnnnnnnnnnnnnnnnnnnnnnnnnnnnnnnnnnnnnnnnnnnnnnnnnnnnnnnnnnnnnnnnnnnnnnnnnnnnnnnnnnnnnnnnnnnnnnnnnnnnnnnnnnnnnnnnnnnnnnnnnnnnnnnnnnnnnnnnnnnnnnnnnnnnnnnnnnnnnnnnnnnnnnnnnnnnnnnnnnnnnnnnnnnnnnnnnnnnnnnnnnnnnnnnnnnnnnnnnnnnnnnnnnnnnnnnnnnnnnnnnnnnnnnnnnnnnnnnnnnnnnnnnnnnnnnnnnnnnnnnnnnnnnnnnnnnnnnnnnnnnnnnnnnnnnnnnnnnnnnnnnnnnnnnnnnnnnnnnnnnnnnnnnnnnnnnnnnnnnnnnnnnnnnnnnnnnnnnnnnnnnnnnnnnnnnnnnnnnnnnnnnnnnnnnnnnnnnnnnnnnnnnnnnnnnnnnnnnnnnnnnnnnnnnnnnnnnnnnnnnnnnnnnnnnnnnnnnnnnnnnnnnnnnnnnnnnnnnnnnnnnnnnnnnnnnnnnnnnnnnnnnnnnnnnnnnnnnnnnnnnnnnnnnnnnnnnnnnnnnnnnnnnnnnnnnnnnnnnnnnnnnnnnnnnnnnnnnnnnnnnnnnnnnnnnnnnnnnnnnnnnnnnnnnnnnnnnnnnnnnnnnnnnnnnnnnnnnnnnnnnnnnnnnnnnnnnnnnnnnnnnnnnnnnnnnnnnnnnnnnnnnnnnnnnnnnnnnnnnnnnnnnnnnnnnnnnnnnnnnnnnnnnnnnnnnnnnnnnnnnnnnnnnnnnnnnnnnnnnnnnnnnnnnnnnnnnnnnnnnnnnnnnnnnnnnnnnnnnnnnnnnnnnnnnnnnnnnnnnnnnnnnnnnnnnnnnnnnnnnnnnnnnnnnnnnnnnnnnnnnnnnnnnnnnnnnnnnnnnnnnnnnnnnnnnnnnnnnnnnnnnnnnnnnnnnnnnnnnnnnnnnnnnnnnnnnnnnnnnnnnnnnnnnnnnnnnnnnnnnnnnnnnnnnnnnnnnnnnnnnnnnnnnnnnnnnnnnnnnnnnnnnnnnnnnnnnnnnnnnnnnnnnnnnnnnnnnnnnnnnnnnnnnnnnnnnnnnnnnnnnnnnnnnnnnnnnnnnnnnnnnnnnnnnnnnnnnnnnnnnnnnnnnnnnnnnnnnnnnnnnnnnnnnnnnnnnnnnnnnnnnnnnnnnnnnnnnnnnnnnnnnnnnnnnnnnnnnnnnnnnnnnnnnnnnnnnnnnnnnnnnnnnnnnnnnnnnnnnnnnnnnnnnnnnnnnnnnnnnnnnnnnnnnnnnnnnnnnnnnnnnnnnnnnnnnnnnnnnnnnnnnnnnnnnnnnnnnnnnnnnnnnnnnnnnnnnnnnnnnnnnnnnnnnnnnnnnnnnnnnnnnnnnnnnnnnnnnnnnnnnnnnnnnnnnnnnnnnnnnnnnnnnnnnnnnnnnnnnnnnnnnnnnnnnnnnnnnnnnnnnnnnnnnnnnnnnnnnnnnnnnnnnnnnnnnnnnnnnnnnnnnnnnnnnnnnnnnnnnnnnnnnnnnnnnnnnnnnnnnnnnnnnnnnnnnnnnnnnnnnnnnnnnnnnnnnnnnnnnnnnnnnnnnnnnnnnnnnnnnnnnnnnnnnnnnnnnnnnnnnnnnnnnnnnnnnnnnnnnnnnnnnnnnnnnnnnnnnnnnnnnnnnnnnnnnnnnnnnnnnnnnnnnnnnnnnnnnnnnnnnnnnnnnnnnnnnnnnnnnnnnnnnnnnnnnnnnnnnnnnnnnnnnnnnnnnnnnnnnnnnnnnnnnnnnnnnnnnnnnnnnnnnnnnnnnnnnnnnnnnnnnnnnnnnnnnnnnnnnnnnnnnnnnnnnnnnnnnnnnnnnnnnnnnnnnnnnnnnnnnnnnnnnnnnnnnnnnnnnnnnnnnnnnnnnnnnnnnnnnnnnnnnnnnnnnnnnnnnnnnnnnnnnnnnnnnnnnnnnnnnnnnnnnnnnnnnnnnnnnnnnnnnnnnnnnnnnnnnnnnnnnnnnnnnnnnnnnnnnnnnnnnnnnnnnnnnnnnnnnnnnnnnnnnnnnnnnnnnnnnnnnnnnnnnnnnnnnnnnnnnnnnnnnnnnnnnnnnnnnnnnnnnnnnnnnnnnnnnnnnnnnnnnnnnnnnnnnnnnnnnnnnnnnnnnnnnnnnnnnnnnnnnnnnnnnnnnnnnnnnnnnnnnnnnnnnnnnnnnnnnnnnnnnnnnnnnnnnnnnnnnnnnnnnnnnnnnnnnnnnnnnnnnnnnnnnnnnnnnnnnnnnnnnnnnnnnnnnnnnnnnnnnnnnnnnnnnnnnnnnnnnnnnnnnnnnnnnnnnnnnnnnnnnnnnnnnnnnnnnnnnnnnnnnnnnnnnnnnnnnnnnnnnnnnnnnnnnnnnnnnnnnnnnnnnnnnnnnnnnnnnnnnnnnnnnnnnnnnnnnnnnnnnnnnnnnnnnnnnnnnnnnnnnnnnnnnnnnnnnnnnnnnnnnnnnnnnnnnnnnnnnnnnnnnnnnnnnnnnnnnnnnnnnnnnnnnnnnnnnnnnnnnnnnnnnnnnnnnnnnnnnnnnnnnnnnnnnnnnnnnnnnnnnnnnnnnnnnnnnnnnnnnnnnnnnnnnnnnnnnnnnnnnnnnnnnnnnnnnnnnnnnnnnnnnnnnnnnnnnnnnnnnnnnnnnnnnnnnnnnnnnnnnnnnnnnnnnnnnnnnnnnnnnnnnnnnnnnnnnnnnnnnnnnnnnnnnnnnnnnnnnnnnnnnnnnnnnnnnnnnnnnnnnnnnnnnnnnnnnnnnnnnnnnnnnnnnnnnnnnnnnnnnnnnnnnnnnnnnnnnnnnnnnnnnnnnnnnnnnnnnnnnnnnnnnnnnnnnnnnnnnnnnnnnnnnnnnnnnnnnnnnnnnnnnnnnnnnnnnnnnnnnnnnnnnnnnnnnnnnnnnnnnnnnnnnnnnnnnnnnnnnnnnnnnnnnnnnnnnnnnnnnnnnnnnnnnnnnnnnnnnnnnnnnnnnnnnnnnnnnnnnnnnnnnnnnnnnnnnnnnnnnnnnnnnnnnnnnnnnnnnnnnnnnnnnnnnnnnnnnnnnnnnnnnnnnnnnnnnnnnnnnnnnnnnnnnnnnnnnnnnnnnnnnnnnnnnnnnnnnnnnnnnnnnnnnnnnnnnnnnnnnnnnnnnnnnnnnnnnnnnnnnnnnnnnnnnnnnnnnnnnnnnnnnnnnnnnnnnnnnnnnnnnnnnnnnnnnnnnnnnnnnnnnnnnnnnnnnnnnnnnnnnnnnnnnnnnnnnnnnnnnnnnnnnnnnnnnnnnnnnnnnnnnnnnnnnnnnnnnnnnnnnnnnnnnnnnnnnnnnnnnnnnnnnnnnnnnnnnnnnnnnnnnnnnnnnnnnnnnnnnnnnnnnnnnnnnnnnnnnnnnnnnnnnnnnnnnnnnnnnnnnnnnnnnnnnnnnnnnnnnnnnnnnnnnnnnnnnnnnnnnnnnnnnnnnnnnnnnnnnnnnnnnnnnnnnnnnnnnnnnnnnnnnnnnnnnnnnnnnnnnnnnnnnnnnnnnnnnnnnnnnnnnnnnnnnnnnnnnnnnnnnnnnnnnnnnnnnnnnnnnnnnnnnnnnnnnnnnnnnnnnnnnnnnnnnnnnnnnnnnnnnnnnnnnnnnnnnnnnnnnnnnnnnnnnnnnnnnnnnnnnnnnnnnnnnnnnnnnnnnnnnnnnnnnnnnnnnnnnnnnnnnnnnnnnnnnnnnnnnnnnnnnnnnnnnnnnnnnnnnnnnnnnnnnnnnnnnnnnnnnnnnnnnnnnnnnnnnnnnnnnnnnnnnnnnnnnnnnnnnnnnnnnnnnnnnnnnnnnnnnnnnnnnnnnnnnnnnnnnnnnnnnnnnnnnnnnnnnnnnnnnnnnnnnnnnnnnnnnnnnnnnnnnnnnnnnnnnnnnnnnnnnnnnnnnnnnnnnnnnnnnnnnnnnnnnnnnnnnnnnnnnnnnnnnnnnnnnnnnnnnnnnnnnnnnnnnnnnnnnnnnnnnnnnnnnnnnnnnnnnnnnnnnnnnnnnnnnnnnnnnnnnnnnnnnnnnnnnnnnnnnnnnnnnnnnnnnnnnnnnnnnnnnnnnnnnnnnnnnnnnnnnnnnnnnnnnnnnnnnnnnnnnnnnnnnnnnnnnnnnnnnnnnnnnnnnnnnnnnnnnnnnnnnnnnnnnnnnnnnnnnnnnnnnnnnnnnnnnnnnnnnnnnnnnnnnnnnnnnnnnnnnnnnnnnnnnnnnnnnnnnnnnnnnnnnnnnnnnnnnnnnnnnnnnnnnnnnnnnnnnnnnnnnnnnnnnnnnnnnnnnnnnnnnnnnnnnnnnnnnnnnnnnnnnnnnnnnnnnnnnnnnnnnnnnnnnnnnnnnnnnnnnnnnnnnnnnnnnnnnnnnnnnnnnnnnnnnnnnnnnnnnnnnnnnnnnnnnnnnnnnnnnnnnnnnnnnnnnnnnnnnnnnnnnnnnnnnnnnnnnnnnnnnnnnnnnnnnnnnnnnnnnnnnnnnnnnnnnnnnnnnnnnnnnnnnnnnnnnnnnnnnnnnnnnnnnnnnnnnnnnnnnnnnnnnnnnnnnnnnnnnnnnnnnnnnnnnnnnnnnnnnnnnnnnnnnnnnnnnnnnnnnnnnnnnnnnnnnnnnnnnnnnnnnnnnnnnnnnnnnnnnnnnnnnnnnnnnnnnnnnnnnnnnnnnnnnnnnnnnnnnnnnnnnnnnnnnnnnnnnnnnnnnnnnnnnnnnnnnnnnnnnnnnnnnnnnnnnnnnnnnnnnnnnnnnnnnnnnnnnnnnnnnnnnnnnnnnnnnnnnnnnnnnnnnnnnnnnnnnnnnnnnnnnnnnnnnnnnnnnnnnnnnnnnnnnnnnnnnnnnnnnnnnnnnnnnnnnnnnnnnnnnnnnnnnnnnnnnnnnnnnnnnnnnnnnnnnnnnnnnnnnnnnnnnnnnnnnnnnnnnnnnnnnnnnnnnnnnnnnnnnnnnnnnnnnnnnnnnnnnnnnnnnnnnnnnnnnnnnnnnnnnnnnnnnnnnnnnnnnnnnnnnnnnnnnnnnnnnnnnnnnnnnnnnnnnnnnnnnnnnnnnnnnnnnnnnnnnnnnnnnnnnnnnnnnnnnnnnnnnnnnnnnnnnnnnnnnnnnnnnnnnnnnnnnnnnnnnnnnnnnnnnnnnnnnnnnnnnnnnnnnnnnnnnnnnnnnnnnnnnnnnnnnnnnnnnnnnnnnnnnnnnnnnnnnnnnnnnnnnnnnnnnnnnnnnnnnnnnnnnnnnnnnnnnnnnnnnnnnnnnnnnnnnnnnnnnnnnnnnnnnnnnnnnnnnnnnnnnnnnnnnnnnnnnnnnnnnnnnnnnnnnnnnnnnnnnnnnnnnnnnnnnnnnnnnnnnnnnnnnnnnnnnnnnnnnnnnnnnnnnnnnnnnnnnnnnnnnnnnnnnnnnnnnnnnnnnnnnnnnnnnnnnnnnnnnnnnnnnnnnnnnnnnnnnnnnnnnnnnnnnnnnnnnnnnnnnnnnnnnnnnnnnnnnnnnnnnnnnnnnnnnnnnnnnnnnnnnnnnnnnnnnnnnnnnnnnnnnnnnnnnnnnnnnnnnnnnnnnnnnnnnnnnnnnnnnnnnnnnnnnnnnnnnnnnnnnnnnnnnnnnnnnnnnnnnnnnnnnnnnnnnnnnnnnnnnnnnnnnnnnnnnnnnnnnnnnnnnnnnnnnnnnnnnnnnnnnnnnnnnnnnnnnnnnnnnnnnnnnnnnnnnnnnnnnnnnnnnnnnnnnnnnnnnnnnnnnnnnnnnnnnnnnnnnnnnnnnnnnnnnnnnnnnnnnnnnnnnnnnnnnnnnnnnnnnnnnnnnnnnnnnnnnnnnnnnnnnnnnnnnnnnnnnnnnnnnnnnnnnnnnnnnnnnnnnnnnnnnnnnnnnnnnnnnnnnnnnnnnnnnnnnnnnnnnnnnnnnnnnnnnnnnnnnnnnnnnnnnnnnnnnnnnnnnnnnnnnnnnnnnnnnnnnnnnnnnnnnnnnnnnnnnnnnnnnnnnnnnnnnnnnnnnnnnnnnnnnnnnnnnnnnnnnnnnnnnnnnnnnnnnnnnnnnnnnnnnnnnnnnnnnnnnnnnnnnnnnnnnnnnnnnnnnnnnnnnnnnnnnnnnnnnnnnnnnnnnnnnnnnnnnnnnnnnnnnnnnnnnnnnnnnnnnnnnnnnnnnnnnnnnnnnnnnnnnnnnnnnnnnnnnnnnnnnnnnnnnnnnnnnnnnnnnnnnnnnnnnnnnnnnnnnnnnnnnnnnnnnnnnnnnnnnnnnnnnnnnnnnnnnnnnnnnnnnnnnnnnnnnnnnnnnnnnnnnnnnnnnnnnnnnnnnnnnnnnnnnnnnnnnnnnnnnnnnnnnnnnnnnnnnnnnnnnnnnnnnnnnnnnnnnnnnnnnnnnnnnnnnnnnnnnnnnnnnnnnnnnnnnnnnnnnnnnnnnnnnnnnnnnnnnnnnnnnnnnnnnnnnnnnnnnnnnnnnnnnnnnnnnnnnnnnnnnnnnnnnnnnnnnnnnnnnnnnnnnnnnnnnnnnnnnnnnnnnnnnnnnnnnnnnnnnnnnnnnnnnnnnnnnnnnnnnnnnnnnnnnnnnnnnnnnnnnnnnnnnnnnnnnnnnnnnnnnnnnnnnnnnnnnnnnnnnnnnnnnnnnnnnnnnnnnnnnnnnnnnnnnnnnnnnnnnnnnnnnnnnnnnnnnnnnnnnnnnnnnnnnnnnnnnnnnnnnnnnnnnnnnnnnnnnnnnnnnnnnnnnnnnnnnnnnnnnnnnnnnnnnnnnnnnnnnnnnnnnnnnnnnnnnnnnnnnnnnnnnnnnnnnnnnnnnnnnnnnnnnnnnnnnnnnnnnnnnnnnnnnnnnnnnnnnnnnnnnnnnnnnnnnnnnnnnnnnnnnnnnnnnnnnnnnnnnnnnnnnnnnnnnnnnnnnnnnnnnnnnnnnnnnnnnnnnnnnnnnnnnnnnnnnnnnnnnnnnnnnnnnnnnnnnnnnnnnnnnnnnnnnnnnnnnnnnnnnnnnnnnnnnnnnnnnnnnnnnnnnnnnnnnnnnnnnnnnnnnnnnnnnnnnnnnnnnnnnnnnnnnnnnnnnnnnnnnnnnnnnnnnnnnnnnnnnnnnnnnnnnnnnnnnnnnnnnnnnnnnnnnnnnnnnnnnnnnnnnnnnnnnnnnnnnnnnnnnnnnnnnnnnnnnnnnnnnnnnnnnnnnnnnnnnnnnnnnnnnnnnnnnnnnnnnnnnnnnnnnnnnnnnnnnnnnnnnnnnnnnnnnnnnnnnnnnnnnnnnnnnnnnnnnnnnnnnnnnnnnnnnnnnnnnnnnnnnnnnnnnnnnnnnnnnnnnnnnnnnnnnnnnnnnnnnnnnnnnnnnnnnnnnnnnnnnnnnnnnnnnnnnnnnnnnnnnnnnnnnnnnnnnnnnnnnnnnnnnnnnnnnnnnnnnnnnnnnnnnnnnnnnnnnnnnnnnnnnnnnnnnnnnnnnnnnnnnnnnnnnnnnnnnnnnnnnnnnnnnnnnnnnnnnnnnnnnnnnnnnnnnnnnnnnnnnnnnnnnnnnnnnnnnnnnnnnnnnnnnnnnnnnnnnnnnnnnnnnnnnnnnnnnnnnnnnnnnnnnnnnnnnnnnnnnnnnnnnnnnnnnnnnnnnnnnnnnnnnnnnnnnnnnnnnnnnnnnnnnnnnnnnnnnnnnnnnnnnnnnnnnnnnnnnnnnnnnnnnnnnnnnnnnnnnnnnnnnnnnnnnnnnnnnnnnnnnnnnnnnnnnnnnnnnnnnnnnnnnnnnnnnnnnnnnnnnnnnnnnnnnnnnnnnnnnnnnnnnnnnnnnnnnnnnnnnnnnnnnnnnnnnnnnnnnnnnnnnnnnnnnnnnnnnnnnnnnnnnnnnnnnnnnnnnnnnnnnnnnnnnnnnnnnnnnnnnnnnnnnnnnnnnnnnnnnnnnnnnnnnnnnnnnnnnnnnnnnnnnnnnnnnnnnnnnnnnnnnnnnnnnnnnnnnnnnnnnnnnnnnnnnnnnnnnnnnnnnnnnnnnnnnnnnnnnnnnnnnnnnnnnnnnnnnnnnnnnnnnnnnnnnnnnnnnnnnnnnnnnnnnnnnnnnnnnnnnnnnnnnnnnnnnnnnnnnnnnnnnnnnnnnnnnnnnnnnnnnnnnnnnnnnnnnnnnnnnnnnnnnnnnnnnnnnnnnnnnnnnnnnnnnnnnnnnnnnnnnnnnnnnnnnnnnnnnnnnnnnnnnnnnnnnnnnnnnnnnnnnnnnnnnnnnnnnnnnnnnnnnnnnnnnnnnnnnnnnnnnnnnnnnnnnnnnnnnnnnnnnnnnnnnnnnnnnnnnnnnnnnnnnnnnnnnnnnnnnnnnnnnnnnnnnnnnnnnnnnnnnnnnnnnnnnnnnnnnnnnnnnnnnnnnnnnnnnnnnnnnnnnnnnnnnnnnnnnnnnnnnnnnnnnnnnnnnnnnnnnnnnnnnnnnnnnnnnnnnnnnnnnnnnnnnnnnnnnnnnnnnnnnnnnnnnnnnnnnnnnnnnnnnnnnnnnnnnnnnnnnnnnnnnnnnnnnnnnnnnnnnnnnnnnnnnnnnnnnnnnnnnnnnnnnnnnnnnnnnnnnnnnnnnnnnnnnnnnnnnnnnnnnnnnnnnnnnnnnnnnnnnnnnnnnnnnnnnnnnnnnnnnnnnnnnnnnnnnnnnnnnnnnnnnnnnnnnnnnnnnnnnnnnnnnnnnnnnnnnnnnnnnnnnnnnnnnnnnnnnnnnnnnnnnnnnnnnnnnnnnnnnnnnnnnnnnnnnnnnnnnnnnnnnnnnnnnnnnnnnnnnnnnnnnnnnnnnnnnnnnnnnnnnnnnnnnnnnnnnnnnnnnnnnnnnnnnnnnnnnnnnnnnnnnnnnnnnnnnnnnnnnnnnnnnnnnnnnnnnnnnnnnnnnnnnnnnnnnnnnnnnnnnnnnnnnnnnnnnnnnnnnnnnnnnnnnnnnnnnnnnnnnnnnnnnnnnnnnnnnnnnnnnnnnnnnnnnnnnnnnnnnnnnnnnnnnnnnnnnnnnnnnnnnnnnnnnnnnnnnnnnnnnnnnnnnnnnnnnnnnnnnnnnnnnnnnnnnnnnnnnnnnnnnnnnnnnnnnnnnnnnnnnnnnnnnnnnnnnnnnnnnnnnnnnnnnnnnnnnnnnnnnnnnnnnnnnnnnnnnnnnnnnnnnnnnnnnnnnnnnnnnnnnnnnnnnnnnnnnnnnnnnnnnnnnnnnnnnnnnnnnnnnnnnnnnnnnnnnnnnnnnnnnnnnnnnnnnnnnnnnnnnnnnnnnnnnnnnnnnnnnnnnnnnnnnnnnnnnnnnnnnnnnnnnnnnnnnnnnnnnnnnnnnnnnnnnnnnnnnnnnnnnnnnnnnnnnnnnnnnnnnnnnnnnnnnnnnnnnnnnnnnnnnnnnnnnnnnnnnnnnnnnnnnnnnnnnnnnnnnnnnnnnnnnnnnnnnnnnnnnnnnnnnnnnnnnnnnnnnnnnnnnnnnnnnnnnnnnnnnnnnnnnnnnnnnnnnnnnnnnnnnnnnnnnnnnnnnnnnnnnnnnnnnnnnnnnnnnnnnnnnnnnnnnnnnnnnnnnnnnnnnnnnnnnnnnnnnnnnnnnnnnnnnnnnnnnnnnnnnnnnnnnnnnnnnnnnnnnnnnnnnnnnnnnnnnnnnnnnnnnnnnnnnnnnnnnnnnnnnnnnnnnnnnnnnnnnnnnnnnnnnnnnnnnnnnnnnnnnnnnnnnnnnnnnnnnnnnnnnnnnnnnnnnnnnnnnnnnnnnnnnnnnnnnnnnnnnnnnnnnnnnnnnnnnnnnnnnnnnnnnnnnnnnnnnnnnnnnnnnnnnnnnnnnnnnnnnnnnnnnnnnnnnnnnnnnnnnnnnnnnnnnnnnnnnnnnnnnnnnnnnnnnnnnnnnnnnnnnnnnnnnnnnnnnnnnnnnnnnnnnnnnnnnnnnnnnnnnnnnnnnnnnnnnnnnnnnnnnnnnnnnnnnnnnnnnnnnnnnnnnnnnnnnnnnnnnnnnnnnnnnnnnnnnnnnnnnnnnnnnnnnnnnnnnnnnnnnnnnnnnnnnnnnnnnnnnnnnnnnnnnnnnnnnnnnnnnnnnnnnnnnnnnnnnnnnnnnnnnnnnnnnnnnnnnnnnnnnnnnnnnnnnnnnnnnnnnnnnnnnnnnnnnnnnnnnnnnnnnnnnnnnnnnnnnnnnnnnnnnnnnnnnnnnnnnnnnnnnnnnnnnnnnnnnnnnnnnnnnnnnnnnnnnnnnnnnnnnnnnnnnnnnnnnnnnnnnnnnnnnnnnnnnnnnnnnnnnnnnnnnnnnnnnnnnnnnnnnnnnnnnnnnnnnnnnnnnnnnnnnnnnnnnnnnnnnnnnnnnnnnnnnnnnnnnnnnnnnnnnnnnnnnnnnnnnnnnnnnnnnnnnnnnnnnnnnnnnnnnnnnnnnnnnnnnnnnnnnnnnnnnnnnnnnnnnnnnnnnnnnnnnnnnnnnnnnnnnnnnnnnnnnnnnnnnnnnnnnnnnnnnnnnnnnnnnnnnnnnnnnnnnnnnnnnnnnnnnnnnnnnnnnnnnnnnnnnnnnnnnnnnnnnnnnnnnnnnnnnnnnnnnnnnnnnnnnnnnnnnnnnnnnnnnnnnnnnnnnnnnnnnnnnnnnnnnnnnnnnnnnnnnnnnnnnnnnnnnnnnnnnnnnnnnnnnnnnnnnnnnnnnnnnnnnnnnnnnnnnnnnnnnnnnnnnnnnnnnnnnnnnnnnnnnnnnnnnnnnnnnnnnnnnnnnnnnnnnnnnnnnnnnnnnnnnnnnnnnnnnnnnnnnnnnnnnnnnnnnnnnnnnnnnnnnnnnnnnnnnnnnnnnnnnnnnnnnnnnnnnnnnnnnnnnnnnnnnnnnnnnnnnnnnnnnnnnnnnnnnnnnnnnnnnnnnnnnnnnnnnnnnnnnnnnnnnnnnnnnnnnnnnnnnnnnnnnnnnnnnnnnnnnnnnnnnnnnnnnnnnnnnnnnnnnnnnnnnnnnnnnnnnnnnnnnnnnnnnnnnnnnnnnnnnnnnnnnnnnnnnnnnnnnnnnnnnnnnnnnnnnnnnnnnnnnnnnnnnnnnnnnnnnnnnnnnnnnnnnnnnnnnnnnnnnnnnnnnnnnnnnnnnnnnnnnnnnnnnnnnnnnnnnnnnnnnnnnnnnnnnnnnnnnnnnnnnnnnnnnnnnnnnnnnnnnnnnnnnnnnnnnnnnnnnnnnnnnnnnnnnnnnnnnnnnnnnnnnnnnnnnnnnnnnnnnnnnnnnnnnnnnnnnnnnnnnnnnnnnnnnnnnnnnnnnnnnnnnnnnnnnnnnnnnnnnnnnnnnnnnnnnnnnnnnnnnnnnnnnnnnnnnnnnnnnnnnnnnnnnnnnnnnnnnnnnnnnnnnnnnnnnnnnnnnnnnnnnnnnnnnnnnnnnnnnnnnnnnnnnnnnnnnnnnnnnnnnnnnnnnnnnnnnnnnnnnnnnnnnnnnnnnnnnnnnnnnnnnnnnnnnnnnnnnnnnnnnnnnnnnnnnnnnnnnnnnnnnnnnnnnnnnnnnnnnnnnnnnnnnnnnnnnnnnnnnnnnnnnnnnnnnnnnnnnnnnnnnnnnnnnnnnnnnnnnnnnnnnnnnnnnnnnnnnnnnnnnnnnnnnnnnnnnnnnnnnnnnnnnnnnnnnnnnnnnnnnnnnnnnnnnnnnnnnnnnnnnnnnnnnnnnnnnnnnnnnnnnnnnnnnnnnnnnnnnnnnnnnnnnnnnnnnnnnnnnnnnnnnnnnnnnnnnnnnnnnnnnnnnnnnnnnnnnnnnnnnnnnnnnnnnnnnnnnnnnnnnnnnnnnnnnnnnnnnnnnnnnnnnnnnnnnnnnnnnnnnnnnnnnnnnnnnnnnnnnnnnnnnnnnnnnnnnnnnnnnnnnnnnnnnnnnnnnnnnnnnnnnnnnnnnnnnnnnnnnnnnnnnnnnnnnnnnnnnnnnnnnnnnnnnnnnnnnnnnnnnnnnnnnnnnnnnnnnnnnnnnnnnnnnnnnnnnnnnnnnnnnnnnnnnnnnnnnnnnnnnnnnnnnnnnnnnnnnnnnnnnnnnnnnnnnnnnnnnnnnnnnnnnnnnnnnnnnnnnnnnnnnnnnnnnnnnnnnnnnnnnnnnnnnnnnnnnnnnnnnnnnnnnnnnnnnnnnnnnnnnnnnnnnnnnnnnnnnnnnnnnnnnnnnnnnnnnnnnnnnnnnnnnnnnnnnnnnnnnnnnnnnnnnnnnnnnnnnnnnnnnnnnnnnnnnnnnnnnnnnnnnnnnnnnnnnnnnnnnnnnnnnnnnnnnnnnnnnnnnnnnnnnnnnnnnnnnnnnnnnnnnnnnnnnnnnnnnnnnnnnnnnnnnnnnnnnnnnnnnnnnnnnnnnnnnnnnnnnnnnnnnnnnnnnnnnnnnnnnnnnnnnnnnnnnnnnnnnnnnnnnnnnnnnnnnnnnnnnnnnnnnnnnnnnnnnnnnnnnnnnnnnnnnnnnnnnnnnnnnnnnnnnnnnnnnnnnnnnnnnnnnnnnnnnnnnnnnnnnnnnnnnnnnnnnnnnnnnnnnnnnnnnnnnnnnnnnnnnnnnnnnnnnnnnnnnnnnnnnnnnnnnnnnnnnnnnnnnnnnnnnnnnnnnnnnnnnnnnnnnnnnnnnnnnnnnnnnnnnnnnnnnnnnnnnnnnnnnnnnnnnnnnnnnnnnnnnnnnnnnnnnnnnnnnnnnnnnnnnnnnnnnnnnnnnnnnnnnnnnnnnnnnnnnnnnnnnnnnnnnnnnnnnnnnnnnnnnnnnnnnnnnnnnnnnnnnnnnnnnnnnnnnnnnnnnnnnnnnnnnnnnnnnnnnnnnnnnnnnnnnnnnnnnnnnnnnnnnnnnnnnnnnnnnnnnnnnnnnnnnnnnnnnnnnnnnnnnnnnnnnnnnnnnnnnnnnnnnnnnnnnnnnnnnnnnnnnnnnnnnnnnnnnnnnnnnnnnnnnnnnnnnnnnnnnnnnnnnnnnnnnnnnnnnnnnnnnnnnnnnnnnnnnnnnnnnnnnnnnnnnnnnnnnnnnnnnnnnnnnnnnnnnnnnnnnnnnnnnnnnnnnnnnnnnnnnnnnnnnnnnnnnnnnnnnnnnnnnnnnnnnnnnnnnnnnnnnnnnnnnnnnnnnnnnnnnnnnnnnnnnnnnnnnnnnnnnnnnnnnnnnnnnnnnnnnnnnnnnnnnnnnnnnnnnnnnnnnnnnnnnnnnnnnnnnnnnnnnnnnnnnnnnnnnnnnnnnnnnnnnnnnnnnnnnnnnnnnnnnnnnnnnnnnnnnnnnnnnnnnnnnnnnnnnnnnnnnnnnnnnnnnnnnnnnnnnnnnnnnnnnnnnnnnnnnnnnnnnnnnnnnnnnnnnnnnnnnnnnnnnnnnnnnnnnnnnnnnnnnnnnnnnnnnnnnnnnnnnnnnnnnnnnnnnnnnnnnnnnnnnnnnnnnnnnnnnnnnnnnnnnnnnnnnnnnnnnnnnnnnnnnnnnnnnnnnnnnnnnnnnnnnnnnnnnnnnnnnnnnnnnnnnnnnnnnnnnnnnnnnnnnnnnnnnnnnnnnnnnnnnnnnnnnnnnnnnnnnnnnnnnnnnnnnnnnnnnnnnnnnnnnnnnnnnnnnnnnnnnnnnnnnnnnnnnnnnnnnnnnnnnnnnnnnnnnnnnnnnnnnnnnnnnnnnnnnnnnnnnnnnnnnnnnnnnnnnnnnnnnnnnnnnnnnnnnnnnnnnnnnnnnnnnnnnnnnnnnnnnnnnnnnnnnnnnnnnnnnnnnnnnnnnnnnnnnnnnnnnnnnnnnnnnnnnnnnnnnnnnnnnnnnnnnnnnnnnnnnnnnnnnnnnnnnnnnnnnnnnnnnnnnnnnnnnnnnnnnnnnnnnnnnnnnnnnnnnnnnnnnnnnnnnnnnnnnnnnnnnnnnnnnnnnnnnnnnnnnnnnnnnnnnnnnnnnnnnnnnnnnnnnnnnnnnnnnnnnnnnnnnnnnnnnnnnnnnnnnnnnnnnnnnnnnnnnnnnnnnnnnnnnnnnnnnnnnnnnnnnnnnnnnnnnnnnnnnnnnnnnnnnnnnnnnnnnnnnnnnnnnnnnnnnnnnnnnnnnnnnnnnnnnnnnnnnnnnnnnnnnnnnnnnnnnnnnnnnnnnnnnnnnnnnnnnnnnnnnnnnnnnnnnnnnnnnnnnnnnnnnnnnnnnnnnnnnnnnnnnnnnnnnnnnnnnnnnnnnnnnnnnnnnnnnnnnnnnnnnnnnnnnnnnnnnnnnnnnnnnnnnnnnnnnnnnnnnnnnnnnnnnnnnnnnnnnnnnnnnnnnnnnnnnnnnnnnnnnnnnnnnnnnnnnnnnnnnnnnnnnnnnnnnnnnnnnnnnnnnnnnnnnnnnnnnnnnnnnnnnnnnnnnnnnnnnnnnnnnnnnnnnnnnnnnnnnnnnnnnnnnnnnnnnnnnnnnnnnnnnnnnnnnnnnnnnnnnnnnnnnnnnnnnnnnnnnnnnnnnnnnnnnnnnnnnnnnnnnnnnnnnnnnnnnnnnnnnnnnnnnnnnnnnnnnnnnnnnnnnnnnnnnnnnnnnnnnnnnnnnnnnnnnnnnnnnnnnnnnnnnnnnnnnnnnnnnnnnnnnnnnnnnnnnnnnnnnnnnnnnnnnnnnnnnnnnnnnnnnnnnnnnnnnnnnnnnnnnnnnnnnnnnnnnnnnnnnnnnnnnnnnnnnnnnnnnnnnnnnnnnnnnnnnnnnnnnnnnnnnnnnnnnnnnnnnnnnnnnnnnnnnnnnnnnnnnnnnnnnnnnnnnnnnnnnnnnnnnnnnnnnnnnnnnnnnnnnnnnnnnnnnnnnnnnnnnnnnnnnnnnnnnnnnnnnnnnnnnnnnnnnnnnnnnnnnnnnnnnnnnnnnnnnnnnnnnnnnnnnnnnnnnnnnnnnnnnnnnnnnnnnnnnnnnnnnnnnnnnnnnnnnnnnnnnnnnnnnnnnnnnnnnnnnnnnnnnnnnnnnnnnnnnnnnnnnnnnnnnnnnnnnnnnnnnnnnnnnnnnnnnnnnnnnnnnnnnnnnnnnnnnnnnnnnnnnnnnnnnnnnnnnnnnnnnnnnnnnnnnnnnnnnnnnnnnnnnnnnnnnnnnnnnnnnnnnnnnnnnnnnnnnnnnnnnnnnnnnnnnnnnnnnnnnnnnnnnnnnnnnnnnnnnnnnnnnnnnnnnnnnnnnnnnnnnnnnnnnnnnnnnnnnnnnnnnnnnnnnnnnnnnnnnnnnnnnnnnnnnnnnnnnnnnnnnnnnnnnnnnnnnnnnnnnnnnnnnnnnnnnnnnnnnnnnnnnnnnnnnnnnnnnnnnnnnnnnnnnnnnnnnnnnnnnnnnnnnnnnnnnnnnnnnnnnnnnnnnnnnnnnnnnnnnnnnnnnnnnnnnnnnnnnnnnnnnnnnnnnnnnnnnnnnnnnnnnnnnnnnnnnnnnnnnnnnnnnnnnnnnnnnnnnnnnnnnnnnnnnnnnnnnnnnnnnnnnnnnnnnnnnnnnnnnnnnnnnnnnnnnnnnnnnnnnnnnnnnnnnnnnnnnnnnnnnnnnnnnnnnnnnnnnnnnnnnnnnnnnnnnnnnnnnnnnnnnnnnnnnnnnnnnnnnnnnnnnnnnnnnnnnnnnnnnnnnnnnnnnnnnnnnnnnnnnnnnnnnnnnnnnnnnnnnnnnnnnnnnnnnnnnnnnnnnnnnnnnnnnnnnnnnnnnnnnnnnnnnnnnnnnnnnnnnnnnnnnnnnnnnnnnnnnnnnnnnnnnnnnnnnnnnnnnnnnnnnnnnnnnnnnnnnnnnnnnnnnnnnnnnnnnnnnnnnnnnnnnnnnnnnnnnnnnnnnnnnnnnnnnnnnnnnnnnnnnnnnnnnnnnnnnnnnnnnnnnnnnnnnnnnnnnnnnnnnnnnnnnnnnnnnnnnnnnnnnnnnnnnnnnnnnnnnnnnnnnnnnnnnnnnnnnnnnnnnnnnnnnnnnnnnnnnnnnnnnnnnnnnnnnnnnnnnnnnnnnnnnnnnnnnnnnnnnnnnnnnnnnnnnnnnnnnnnnnnnnnnnnnnnnnnnnnnnnnnnnnnnnnnnnnnnnnnnnnnnnnnnnnnnnnnnnnnnnnnnnnnnnnnnnnnnnnnnnnnnnnnnnnnnnnnnnnnnnnnnnnnnnnnnnnnnnnnnnnnnnnnnnnnnnnnnnnnnnnnnnnnnnnnnnnnnnnnnnnnnnnnnnnnnnnnnnnnnnnnnnnnnnnnnnnnnnnnnnnnnnnnnnnnnnnnnnnnnnnnnnnnnnnnnnnnnnnnnnnnnnnnnnnnnnnnnnnnnnnnnnnnnnnnnnnnnnnnnnnnnnnnnnnnnnnnnnnnnnnnnnnnnnnnnnnnnnnnnnnnnnnnnnnnnnnnnnnnnnnnnnnnnnnnnnnnnnnnnnnnnnnnnnnnnnnnnnnnnnnnnnnnnnnnnnnnnnnnnnnnnnnnnnnnnnnnnnnnnnnnnnnnnnnnnnnnnnnnnnnnnnnnnnnnnnnnnnnnnnnnnnnnnnnnnnnnnnnnnnnnnnnnnnnnnnnnnnnnnnnnnnnnnnnnnnnnnnnnnnnnnnnnnnnnnnnnnnnnnnnnnnnnnnnnnnnnnnnnnnnnnnnnnnnnnnnnnnnnnnnnnnnnnnnnnnnnnnnnnnnnnnnnnnnnnnnnnnnnnnnnnnnnnnnnnnnnnnnnnnnnnnnnnnnnnnnnnnnnnnnnnnnnnnnnnnnnnnnnnnnnnnnnnnnnnnnnnnnnnnnnnnnnnnnnnnnnnnnnnnnnnnnnnnnnnnnnnnnnnnnnnnnnnnnnnnnnnnnnnnnnnnnnnnnnnnnnnnnnnnnnnnnnnnnnnnnnnnnnnnnnnnnnnnnnnnnnnnnnnnnnnnnnnnnnnnnnnnnnnnnnnnnnnnnnnnnnnnnnnnnnnnnnnnnnnnnnnnnnnnnnnnnnnnnnnnnnnnnnnnnnnnnnnnnnnnnnnnnnnnnnnnnnnnnnnnnnnnnnnnnnnnnnnnnnnnnnnnnnnnnnnnnnnnnnnnnnnnnnnnnnnnnnnnnnnnnnnnnnnnnnnnnnnnnnnnnnnnnnnnnnnnnnnnnnnnnnnnnnnnnnnnnnnnnnnnnnnnnnnnnnnnnnnnnnnnnnnnnnnnnnnnnnnnnnnnnnnnnnnnnnnnnnnnnnnnnnnnnnnnnnnnnnnnnnnnnnnnnnnnnnnnnnnnnnnnnnnnnnnnnnnnnnnnnnnnnnnnnnnnnnnnnnnnnnnnnnnnnnnnnnnnnnnnnnnnnnnnnnnnnnnnnnnnnnnnnnnnnnnnnnnnnnnnnnnnnnnnnnnnnnnnnnnnnnnnnnnnnnnnnnnnnnnnnnnnnnnnnnnnnnnnnnnnnnnnnnnnnnnnnnnnnnnnnnnnnnnnnnnnnnnnnnnnnnnnnnnnnnnnnnnnnnnnnnnnnnnnnnnnnnnnnnnnnnnnnnnnnnnnnnnnnnnnnnnnnnnnnnnnnnnnnnnnnnnnnnnnnnnnnnnnnnnnnnnnnnnnnnnnnnnnnnnnnnnnnnnnnnnnnnnnnnnnnnnnnnnnnnnnnnnnnnnnnnnnnnnnnnnnnnnnnnnnnnnnnnnnnnnnnnnnnnnnnnnnnnnnnnnnnnnnnnnnnnnnnnnnnnnnnnnnnnnnnnnnnnnnnnnnnnnnnnnnnnnnnnnnnnnnnnnnnnnnnnnnnnnnnnnnnnnnnnnnnnnnnnnnnnnnnnnnnnnnnnnnnnnnnnnnnnnnnnnnnnnnnnnnnnnnnnnnnnnnnnnnnnnnnnnnnnnnnnnnnnnnnnnnnnnnnnnnnnnnnnnnnnnnnnnnnnnnnnnnnnnnnnnnnnnnnnnnnnnnnnnnnnnnnnnnnnnnnnnnnnnnnnnnnnnnnnnnnnnnnnnnnnnnnnnnnnnnnnnnnnnnnnnnnnnnnnnnnnnnnnnnnnnnnnnnnnnnnnnnnnnnnnnnnnnnnnnnnnnnnnnnnnnnnnnnnnnnnnnnnnnnnnnnnnnnnnnnnnnnnnnnnnnnnnnnnnnnnnnnnnnnnnnnnnnnnnnnnnnnnnnnnnnnnnnnnnnnnnnnnnnnnnnnnnnnnnnnnnnnnnnnnnnnnnnnnnnnnnnnnnnnnnnnnnnnnnnnnnnnnnnnnnnnnnnnnnnnnnnnnnnnnnnnnnnnnnnnnnnnnnnnnnnnnnnnnnnnnnnnnnnnnnnnnnnnnnnnnnnnnnnnnnnnnnnnnnnnnnnnnnnnnnnnnnnnnnnnnnnnnnnnnnnnnnnnnnnnnnnnnnnnnnnnnnnnnnnnnnnnnnnnnnnnnnnnnnnnnnnnnnnnnnnnnnnnnnnnnnnnnnnnnnnnnnnnnnnnnnnnnnnnnnnnnnnnnnnnnnnnnnnnnnnnnnnnnnnnnnnnnnnnnnnnnnnnnnnnnnnnnnnnnnnnnnnnnnnnnnnnnnnnnnnnnnnnnnnnnnnnnnnnnnnnnnnnnnnnnnnnnnnnnnnnnnnnnnnnnnnnnnnnnnnnnnnnnnnnnnnnnnnnnnnnnnnnnnnnnnnnnnnnnnnnnnnnnnnnnnnnnnnnnnnnnnnnnnnnnnnnnnnnnnnnnnnnnnnnnnnnnnnnnnnnnnnnnnnnnnnnnnnnnnnnnnnnnnnnnnnnnnnnnnnnnnnnnnnnnnnnnnnnnnnnnnnnnnnnnnnnnnnnnnnnnnnnnnnnnnnnnnnnnnnnnnnnnnnnnnnnnnnnnnnnnnnnnnnnnnnnnnnnnnnnnnnnnnnnnnnnnnnnnnnnnnnnnnnnnnnnnnnnnnnnnnnnnnnnnnnnnnnnnnnnnnnnnnnnnnnnnnnnnnnnnnnnnnnnnnnnnnnnnnnnnnnnnnnnnnnnnnnnnnnnnnnnnnnnnnnnnnnnnnnnnnnnnnnnnnnnnnnnnnnnnnnnnnnnnnnnnnnnnnnnnnnnnnnnnnnnnnnnnnnnnnnnnnnnnnnnnnnnnnnnnnnnnnnnnnnnnnnnnnnnnnnnnnnnnnnnnnnnnnnnnnnnnnnnnnnnnnnnnnnnnnnnnnnnnnnnnnnnnnnnnnnnnnnnnnnnnnnnnnnnnnnnnnnnnnnnnnnnnnnnnnnnnnnnnnnnnnnnnnnnnnnnnnnnnnnnnnnnnnnnnnnnnnnnnnnnnnnnnnnnnnnnnnnnnnnnnnnnnnnnnnnnnnnnnnnnnnnnnnnnnnnnnnnnnnnnnnnnnnnnnnnnnnnnnnnnnnnnnnnnnnnnnnnnnnnnnnnnnnnnnnnnnnnnnnnnnnnnnnnnnnnnnnnnnnnnnnnnnnnnnnnnnnnnnnnnnnnnnnnnnnnnnnnnnnnnnnnnnnnnnnnnnnnnnnnnnnnnnnnnnnnnnnnnnnnnnnnnnnnnnnnnnnnnnnnnnnnnnnnnnnnnnnnnnnnnnnnnnnnnnnnnnnnnnnnnnnnnnnnnnnnnnnnnnnnnnnnnnnnnnnnnnnnnnnnnnnnnnnnnnnnnnnnnnnnnnnnnnnnnnnnnnnnnnnnnnnnnnnnnnnnnnnnnnnnnnnnnnnnnnnnnnnnnnnnnnnnnnnnnnnnnnnnnnnnnnnnnnnnnnnnnnnnnnnnnnnnnnnnnnnnnnnnnnnnnnnnnnnnnnnnnnnnnnnnnnnnnnnnnnnnnnnnnnnnnnnnnnnnnnnnnnnnnnnnnnnnnnnnnnnnnnnnnnnnnnnnnnnnnnnnnnnnnnnnnnnnnnnnnnnnnnnnnnnnnnnnnnnnnnnnnnnnnnnnnnnnnnnnnnnnnnnnnnnnnnnnnnnnnnnnnnnnnnnnnnnnnnnnnnnnnnnnnnnnnnnnnnnnnnnnnnnnnnnnnnnnnnnnnnnnnnnnnnnnnnnnnnnnnnnnnnnnnnnnnnnnnnnnnnnnnnnnnnnnnnnnnnnnnnnnnnnnnnnnnnnnnnnnnnnnnnnnnnnnnnnnnnnnnnnnnnnnnnnnnnnnnnnnnnnnnnnnnnnnnnnnnnnnnnnnnnnnnnnnnnnnnnnnnnnnnnnnnnnnnnnnnnnnnnnnnnnnnnnnnnnnnnnnnnnnnnnnnnnnnnnnnnnnnnnnnnnnnnnnnnnnnnnnnnnnnnnnnnnnnnnnnnnnnnnnnnnnnnnnnnnnnnnnnnnnnnnnnnnnnnnnnnnnnnnnnnnnnnnnnnnnnnnnnnnnnnnnnnnnnnnnnnnnnnnnnnnnnnnnnnnnnnnnnnnnnnnnnnnnnnnnnnnnnnnnnnnnnnnnnnnnnnnnnnnnnnnnnnnnnnnnnnnnnnnnnnnnnnnnnnnnnnnnnnnnnnnnnnnnnnnnnnnnnnnnnnnnnnnnnnnnnnnnnnnnnnnnnnnnnnnnnnnnnnnnnnnnnnnnnnnnnnnnnnnnnnnnnnnnnnnnnnnnnnnnnnnnnnnnnnnnnnnnnnnnnnnnnnnnnnnnnnnnnnnnnnnnnnnnnnnnnnnnnnnnnnnnnnnnnnnnnnnnnnnnnnnnnnnnnnnnnnnnnnnnnnnnnnnnnnnnnnnnnnnnnnnnnnnnnnnnnnnnnnnnnnnnnnnnnnnnnnnnnnnnnnnnnnnnnnnnnnnnnnnnnnnnnnnnnnnnnnnnnnnnnnnnnnnnnnnnnnnnnnnnnnnnnnnnnnnnnnnnnnnnnnnnnnnnnnnnnnnnnnnnnnnnnnnnnnnnnnnnnnnnnnnnnnnnnnnnnnnnnnnnnnnnnnnnnnnnnnnnnnnnnnnnnnnnnnnnnnnnnnnnnnnnnnnnnnnnnnnnnnnnnnnnnnnnnnnnnnnnnnnnnnnnnnnnnnnnnnnnnnnnnnnnnnnnnnnnnnnnnnnnnnnnnnnnnnnnnnnnnnnnnnnnnnnnnnnnnnnnnnnnnnnnnnnnnnnnnnnnnnnnnnnnnnnnnnnnnnnnnnnnnnnnnnnnnnnnnnnnnnnnnnnnnnnnnnnnnnnnnnnnnnnnnnnnnnnnnnnnnnnnnnnnnnnnnnnnnnnnnnnnnnnnnnnnnnnnnnnnnnnnnnnnnnnnnnnnnnnnnnnnnnnnnnnnnnnnnnnnnnnnnnnnnnnnnnnnnnnnnnnnnnnnnnnnnnnnnnnnnnnnnnnnnnnnnnnnnnnnnnnnnnnnnnnnnnnnnnnnnnnnnnnnnnnnnnnnnnnnnnnnnnnnnnnnnnnnnnnnnnnnnnnnnnnnnnnnnnnnnnnnnnnnnnnnnnnnnnnnnnnnnnnnnnnnnnnnnnnnnnnnnnnnnnnnnnnnnnnnnnnnnnnnnnnnnnnnnnnnnnnnnnnnnnnnnnnnnnnnnnnnnnnnnnnnnnnnnnnnnnnnnnnnnnnnnnnnnnnnnnnnnnnnnnnnnnnnnnnnnnnnnnnnnnnnnnnnnnnnnnnnnnnnnnnnnnnnnnnnnnnnnnnnnnnnnnnnnnnnnnnnnnnnnnnnnnnnnnnnnnnnnnnnnnnnnnnnnnnnnnnnnnnnnnnnnnnnnnnnnnnnnnnnnnnnnnnnnnnnnnnnnnnnnnnnnnnnnnnnnnnnnnnnnnnnnnnnnnnnnnnnnnnnnnnnnnnnnnnnnnnnnnnnnnnnnnnnnnnnnnnnnnnnnnnnnnnnnnnnnnnnnnnnnnnnnnnnnnnnnnnnnnnnnnnnnnnnnnnnnnnnnnnnnnnnnnnnnnnnnnnnnnnnnnnnnnnnnnnnnnnnnnnnnnnnnnnnnnnnnnnnnnnnnnnnnnnnnnnnnnnnnnnnnnnnnnnnnnnnnnnnnnnnnnnnnnnnnnnnnnnnnnnnnnnnnnnnnnnnnnnnnnnnnnnnnnnnnnnnnnnnnnnnnnnnnnnnnnnnnnnnnnnnnnnnnnnnnnnnnnnnnnnnnnnnnnnnnnnnnnnnnnnnnnnnnnnnnnnnnnnnnnnnnnnnnnnnnnnnnnnnnnnnnnnnnnnnnnnnnnnnnnnnnnnnnnnnnnnnnnnnnnnnnnnnnnnnnnnnnnnnnnnnnnnnnnnnnnnnnnnnnnnnnnnnnnnnnnnnnnnnnnnnnnnnnnnnnnnnnnnnnnnnnnnnnnnnnnnnnnnnnnnnnnnnnnnnnnnnnnnnnnnnnnnnnnnnnnnnnnnnnnnnnnnnnnnnnnnnnnnnnnnnnnnnnnnnnnnnnnnnnnnnnnnnnnnnnnnnnnnnnnnnnnnnnnnnnnnnnnnnnnnnnnnnnnnnnnnnnnnnnnnnnnnnnnnnnnnnnnnnnnnnnnnnnnnnnnnnnnnnnnnnnnnnnnnnnnnnnnnnnnnnnnnnnnnnnnnnnnnnnnnnnnnnnnnnnnnnnnnnnnnnnnnnnnnnnnnnnnnnnnnnnnnnnnnnnnnnnnnnnnnnnnnnnnnnnnnnnnnnnnnnnnnnnnnnnnnnnnnnnnnnnnnnnnnnnnnnnnnnnnnnnnnnnnnnnnnnnnnnnnnnnnnnnnnnnnnnnnnnnnnnnnnnnnnnnnnnnnnnnnnnnnnnnnnnnnnnnnnnnnnnnnnnnnnnnnnnnnnnnnnnnnnnnnnnnnnnnnnnnnnnnnnnnnnnnnnnnnnnnnnnnnnnnnnnnnnnnnnnnnnnnnnnnnnnnnnnnnnnnnnnnnnnnnnnnnnnnnnnnnnnnnnnnnnnnnnnnnnnnnnnnnnnnnnnnnnnnnnnnnnnnnnnnnnnnnnnnnnnnnnnnnnnnnnnnnnnnnnnnnnnnnnnnnnnnnnnnnnnnnnnnnnnnnnnnnnnnnnnnnnnnnnnnnnnnnnnnnnnnnnnnnnnnnnnnnnnnnnnnnnnnnnnnnnnnnnnnnnnnnnnnnnnnnnnnnnnnnnnnnnnnnnnnnnnnnnnnnnnnnnnnnnnnnnnnnnnnnnnnnnnnnnnnnnnnnnnnnnnnnnnnnnnnnnnnnnnnnnnnnnnnnnnnnnnnnnnnnnnnnnnnnnnnnnnnnnnnnnnnnnnnnnnnnnnnnnnnnnnnnnnnnnnnnnnnnnnnnnnnnnnnnnnnnnnnnnnnnnnnnnnnnnnnnnnnnnnnnnnnnnnnnnnnnnnnnnnnnnnnnnnnnnnnnnnnnnnnnnnnnnnnnnnnnnnnnnnnnnnnnnnnnnnnnnnnnnnnnnnnnnnnnnnnnnnnnnnnnnnnnnnnnnnnnnnnnnnnnnnnnnnnnnnnnnnnnnnnnnnnnnnnnnnnnnnnnnnnnnnnnnnnnnnnnnnnnnnnnnnnnnnnnnnnnnnnnnnnnnnnnnnnnnnnnnnnnnnnnnnnnnnnnnnnnnnnnnnnnnnnnnnnnnnnnnnnnnnnnnnnnnnnnnnnnnnnnnnnnnnnnnnnnnnnnnnnnnnnnnnnnnnnnnnnnnnnnnnnnnnnnnnnnnnnnnnnnnnnnnnnnnnnnnnnnnnnnnnnnnnnnnnnnnnnnnnnnnnnnnnnnnnnnnnnnnnnnnnnnnnnnnnnnnnnnnnnnnnnnnnnnnnnnnnnnnnnnnnnnnnnnnnnnnnnnnnnnnnnnnnnnnnnnnnnnnnnnnnnnnnnnnnnnnnnnnnnnnnnnnnnnnnnnnnnnnnnnnnnnnnnnnnnnnnnnnnnnnnnnnnnnnnnnnnnnnnnnnnnnnnnnnnnnnnnnnnnnnnnnnnnnnnnnnnnnnnnnnnnnnnnnnnnnnnnnnnnnnnnnnnnnnnnnnnnnnnnnnnnnnnnnnnnnnnnnnnnnnnnnnnnnnnnnnnnnnnnnnnnnnnnnnnnnnnnnnnnnnnnnnnnnnnnnnnnnnnnnnnnnnnnnnnnnnnnnnnnnnnnnnnnnnnnnnnnnnnnnnnnnnnnnnnnnnnnnnnnnnnnnnnnnnnnnnnnnnnnnnnnnnnnnnnnnnnnnnnnnnnnnnnnnnnnnnnnnnnnnnnnnnnnnnnnnnnnnnnnnnnnnnnnnnnnnnnnnnnnnnnnnnnnnnnnnnnnnnnnnnnnnnnnnnnnnnnnnnnnnnnnnnnnnnnnnnnnnnnnnnnnnnnnnnnnnnnnnnnnnnnnnnnnnnnnnnnnnnnnnnnnnnnnnnnnnnnnnnnnnnnnnnnnnnnnnnnnnnnnnnnnnnnnnnnnnnnnnnnnnnnnnnnnnnnnnnnnnnnnnnnnnnnnnnnnnnnnnnnnnnnnnnnnnnnnnnnnnnnnnnnnnnnnnnnnnnnnnnnnnnnnnnnnnnnnnnnnnnnnnnnnnnnnnnnnnnnnnnnnnnnnnnnnnnnnnnnnnnnnnnnnnnnnnnnnnnnnnnnnnnnnnnnnnnnnnnnnnnnnnnnnnnnnnnnnnnnnnnnnnnnnnnnnnnnnnnnnnnnnnnnnnnnnnnnnnnnnnnnnnnnnnnnnnnnnnnnnnnnnnnnnnnnnnnnnnnnnnnnnnnnnnnnnnnnnnnnnnnnnnnnnnnnnnnnnnnnnnnnnnnnnnnnnnnnnnnnnnnnnnnnnnnnnnnnnnnnnnnnnnnnnnnnnnnnnnnnnnnnnnnnnnnnnnnnnnnnnnnnnnnnnnnnnnnnnnnnnnnnnnnnnnnnnnnnnnnnnnnnnnnnnnnnnnnnnnnnnnnnnnnnnnnnnnnnnnnnnnnnnnnnnnnnnnnnnnnnnnnnnnnnnnnnnnnnnnnnnnnnnnnnnnnnnnnnnnnnnnnnnnnnnnnnnnnnnnnnnnnnnnnnnnnnnnnnnnnnnnnnnnnnnnnnnnnnnnnnnnnnnnnnnnnnnnnnnnnnnnnnnnnnnnnnnnnnnnnnnnnnnnnnnnnnnnnnnnnnnnnnnnnnnnnnnnnnnnnnnnnnnnnnnnnnnnnnnnnnnnnnnnnnnnnnnnnnnnnnnnnnnnnnnnnnnnnnnnnnnnnnnnnnnnnnnnnnnnnnnnnnnnnnnnnnnnnnnnnnnnnnnnnnnnnnnnnnnnnnnnnnnnnnnnnnnnnnnnnnnnnnnnnnnnnnnnnnnnnnnnnnnnnnnnnnnnnnnnnnnnnnnnnnnnnnnnnnnnnnnnnnnnnnnnnnnnnnnnnnnnnnnnnnnnnnnnnnnnnnnnnnnnnnnnnnnnnnnnnnnnnnnnnnnnnnnnnnnnnnnnnnnnnnnnnnnnnnnnnnnnnnnnnnnnnnnnnnnnnnnnnnnnnnnnnnnnnnnnnnnnnnnnnnnnnnnnnnnnnnnnnnnnnnnnnnnnnnnnnnnnnnnnnnnnnnnnnnnnnnnnnnnnnnnnnnnnnnnnnnnnnnnnnnnnnnnnnnnnnnnnnnnnnnnnnnnnnnnnnnnnnnnnnnnnnnnnnnnnnnnnnnnnnnnnnnnnnnnnnnnnnnnnnnnnnnnnnnnnnnnnnnnnnnnnnnnnnnnnnnnnnnnnnnnnnnnnnnnnnnnnnnnnnnnnnnnnnnnnnnnnnnnnnnnnnnnnnnnnnnnnnnnnnnnnnnnnnnnnnnnnnnnnnnnnnnnnnnnnnnnnnnnnnnnnnnnnnnnnnnnnnnnnnnnnnnnnnnnnnnnnnnnnnnnnnnnnnnnnnnnnnnnnnnnnnnnnnnnnnnnnnnnnnnnnnnnnnnnnnnnnnnnnnnnnnnnnnnnnnnnnnnnnnnnnnnnnnnnnnnnnnnnnnnnnnnnnnnnnnnnnnnnnnnnnnnnnnnnnnnnnnnnnnnnnnnnnnnnnnnnnnnnnnnnnnnnnnnnnnnnnnnnnnnnnnnnnnnnnnnnnnnnnnnnnnnnnnnnnnnnnnnnnnnnnnnnnnnnnnnnnnnnnnnnnnnnnnnnnnnnnnnnnnnnnnnnnnnnnnnnnnnnnnnnnnnnnnnnnnnnnnnnnnnnnnnnnnnnnnnnnnnnnnnnnnnnnnnnnnnnnnnnnnnnnnnnnnnnnnnnnnnnnnnnnnnnnnnnnnnnnnnnnnnnnnnnnnnnnnnnnnnnnnnnnnnnnnnnnnnnnnnnnnnnnnnnnnnnnnnnnnnnnnnnnnnnnnnnnnnnnnnnnnnnnnnnnnnnnnnnnnnnnnnnnnnnnnnnnnnnnnnnnnnnnnnnnnnnnnnnnnnnnnnnnnnnnnnnnnnnnnnnnnnnnnnnnnnnnnnnnnnnnnnnnnnnnnnnnnnnnnnnnnnnnnnnnnnnnnnnnnnnnnnnnnnnnnnnnnnnnnnnnnnnnnnnnnnnnnnnnnnnnnnnnnnnnnnnnnnnnnnnnnnnnnnnnnnnnnnnnnnnnnnnnnnnnnnnnnnnnnnnnnnnnnnnnnnnnnnnnnnnnnnnnnnnnnnnnnnnnnnnnnnnnnnnnnnnnnnnnnnnnnnnnnnnnnnnnnnnnnnnnnnnnnnnnnnnnnnnnnnnnnnnnnnnnnnnnnnnnnnnnnnnnnnnnnnnnnnnnnnnnnnnnnnnnnnnnnnnnnnnnnnnnnnnnnnnnnnnnnnnnnnnnnnnnnnnnnnnnnnnnnnnnnnnnnnnnnnnnnnnnnnnnnnnnnnnnnnnnnnnnnnnnnnnnnnnnnnnnnnnnnnnnnnnnnnnnnnnnnnnnnnnnnnnnnnnnnnnnnnnnnnnnnnnnnnnnnnnnnnnnnnnnnnnnnnnnnnnnnnnnnnnnnnnnnnnnnnnnnnnnnnnnnnnnnnnnnnnnnnnnnnnnnnnnnnnnnnnnnnnnnnnnnnnnnnnnnnnnnnnnnnnnnnnnnnnnnnnnnnnnnnnnnnnnnnnnnnnnnnnnnnnnnnnnnnnnnnnnnnnnnnnnnnnnnnnnnnnnnnnnnnnnnnnnnnnnnnnnnnnnnnnnnnnnnnnnnnnnnnnnnnnnnnnnnnnnnnnnnnnnnnnnnnnnnnnnnnnnnnnnnnnnnnnnnnnnnnnnnnnnnnnnnnnnnnnnnnnnnnnnnnnnnnnnnnnnnnnnnnnnnnnnnnnnnnnnnnnnnnnnnnnnnnnnnnnnnnnnnnnnnnnnnnnnnnnnnnnnnnnnnnnnnnnnnnnnnnnnnnnnnnnnnnnnnnnnnnnnnnnnnnnnnnnnnnnnnnnnnnnnnnnnnnnnnnnnnnnnnnnnnnnnnnnnnnnnnnnnnnnnnnnnnnnnnnnnnnnnnnnnnnnnnnnnnnnnnnnnnnnnnnnnnnnnnnnnnnnnnnnnnnnnnnnnnnnnnnnnnnnnnnnnnnnnnnnnnnnnnnnnnnnnnnnnnnnnnnnnnnnnnnnnnnnnnnnnnnnnnnnnnnnnnnnnnnnnnnnnnnnnnnnnnnnnnnnnnnnnnnnnnnnnnnnnnnnnnnnnnnnnnnnnnnnnnnnnnnnnnnnnnnnnnnnnnnnnnnnnnnnnnnnnnnnnnnnnnnnnnnnnnnnnnnnnnnnnnnnnnnnnnnnnnnnnnnnnnnnnnnnnnnnnnnnnnnnnnnnnnnnnnnnnnnnnnnnnnnnnnnnnnnnnnnnnnnnnnnnnnnnnnnnnnnnnnnnnnnnnnnnnnnnnnnnnnnnnnnnnnnnnnnnnnnnnnnnnnnnnnnnnnnnnnnnnnnnnnnnnnnnnnnnnnnnnnnnnnnnnnnnnnnnnnnnnnnnnnnnnnnnnnnnnnnnnnnnnnnnnnnnnnnnnnnnnnnnnnnnnnnnnnnnnnnnnnnnnnnnnnnnnnnnnnnnnnnnnnnnnnnnnnnnnnnnnnnnnnnnnnnnnnnnnnnnnnnnnnnnnnnnnnnnnnnnnnnnnnnnnnnnnnnnnnnnnnnnnnnnnnnnnnnnnnnnnnnnnnnnnnnnnnnnnnnnnnnnnnnnnnnnnnnnnnnnnnnnnnnnnnnnnnnnnnnnnnnnnnnnnnnnnnnnnnnnnnnnnnnnnnnnnnnnnnnnnnnnnnnnnnnnnnnnnnnnnnnnnnnnnnnnnnnnnnnnnnnnnnnnnnnnnnnnnnnnnnnnnnnnnnnnnnnnnnnnnnnnnnnnnnnnnnnnnnnnnnnnnnnnnnnnnnnnnnnnnnnnnnnnnnnnnnnnnnnnnnnnnnnnnnnnnnnnnnnnnnnnnnnnnnnnnnnnnnnnnnnnnnnnnnnnnnnnnnnnnnnnnnnnnnnnnnnnnnnnnnnnnnnnnnnnnnnnnnnnnnnnnnnnnnnnnnnnnnnnnnnnnnnnnnnnnnnnnnnnnnnnnnnnnnnnnnnnnnnnnnnnnnnnnnnnnnnnnnnnnnnnnnnnnnnnnnnnnnnnnnnnnnnnnnnnnnnnnnnnnnnnnnnnnnnnnnnnnnnnnnnnnnnnnnnnnnnnnnnnnnnnnnnnnnnnnnnnnnnnnnnnnnnnnnnnnnnnnnnnnnnnnnnnnnnnnnnnnnnnnnnnnnnnnnnnnnnnnnnnnnnnnnnnnnnnnnnnnnnnnnnnnnnnnnnnnnnnnnnnnnnnnnnnnnnnnnnnnnnnnnnnnnnnnnnnnnnnnnnnnnnnnnnnnnnnnnnnnnnnnnnnnnnnnnnnnnnnnnnnnnnnnnnnnnnnnnnnnnnnnnnnnnnnnnnnnnnnnnnnnnnnnnnnnnnnnnnnnnnnnnnnnnnnnnnnnnnnnnnnnnnnnnnnnnnnnnnnnnnnnnnnnnnnnnnnnnnnnnnnnnnnnnnnnnnnnnnnnnnnnnnnnnnnnnnnnnnnnnnnnnnnnnnnnnnnnnnnnnnnnnnnnnnnnnnnnnnnnnnnnnnnnnnnnnnnnnnnnnnnnnnnnnnnnnnnnnnnnnnnnnnnnnnnnnnnnnnnnnnnnnnnnnnnnnnnnnnnnnnnnnnnnnnnnnnnnnnnnnnnnnnnnnnnnnnnnnnnnnnnnnnnnnnnnnnnnnnnnnnnnnnnnnnnnnnnnnnnnnnnnnnnnnnnnnnnnnnnnnnnnnnnnnnnnnnnnnnnnnnnnnnnnnnnnnnnnnnnnnnnnnnnnnnnnnnnnnnnnnnnnnnnnnnnnnnnnnnnnnnnnnnnnnnnnnnnnnnnnnnnnnnnnnnnnnnnnnnnnnnnnnnnnnnnnnnnnnnnnnnnnnnnnnnnnnnnnnnnnnnnnnnnnnnnnnnnnnnnnnnnnnnnnnnnnnnnnnnnnnnnnnnnnnnnnnnnnnnnnnnnnnnnnnnnnnnnnnnnnnnnnnnnnnnnnnnnnnnnnnnnnnnnnnnnnnnnnnnnnnnnnnnnnnnnnnnnnnnnnnnnnnnnnnnnnnnnnnnnnnnnnnnnnnnnnnnnnnnnnnnnnnnnnnnnnnnnnnnnnnnnnnnnnnnnnnnnnnnnnnnnnnnnnnnnnnnnnnnnnnnnnnnnnnnnnnnnnnnnnnnnnnnnnnnnnnnnnnnnnnnnnnnnnnnnnnnnnnnnnnnnnnnnnnnnnnnnnnnnnnnnnnnnnnnnnnnnnnnnnnnnnnnnnnnnnnnnnnnnnnnnnnnnnnnnnnnnnnnnnnnnnnnnnnnnnnnnnnnnnnnnnnnnnnnnnnnnnnnnnnnnnnnnnnnnnnnnnnnnnnnnnnnnnnnnnnnnnnnnnnnnnnnnnnnnnnnnnnnnnnnnnnnnnnnnnnnnnnnnnnnnnnnnnnnnnnnnnnnnnnnnnnnnnnnnnnnnnnnnnnnnnnnnnnnnnnnnnnnnnnnnnnnnnnnnnnnnnnnnnnnnnnnnnnnnnnnnnnnnnnnnnnnnnnnnnnnnnnnnnnnnnnnnnnnnnnnnnnnnnnnnnnnnnnnnnnnnnnnnnnnnnnnnnnnnnnnnnnnnnnnnnnnnnnnnnnnnnnnnnnnnnnnnnnnnnnnnnnnnnnnnnnnnnnnnnnnnnnnnnnnnnnnnnnnnnnnnnnnnnnnnnnnnnnnnnnnnnnnnnnnnnnnnnnnnnnnnnnnnnnnnnnnnnnnnnnnnnnnnnnnnnnnnnnnnnnnnnnnnnnnnnnnnnnnnnnnnnnnnnnnnnnnnnnnnnnnnnnnnnnnnnnnnnnnnnnnnnnnnnnnnnnnnnnnnnnnnnnnnnnnnnnnnnnnnnnnnnnnnnnnnnnnnnnnnnnnnnnnnnnnnnnnnnnnnnnnnnnnnnnnnnnnnnnnnnnnnnnnnnnnnnnnnnnnnnnnnnnnnnnnnnnnnnnnnnnnnnnnnnnnnnnnnnnnnnnnnnnnnnnnnnnnnnnnnnnnnnnnnnnnnnnnnnnnnnnnnnnnnnnnnnnnnnnnnnnnnnnnnnnnnnnnnnnnnnnnnnnnnnnnnnnnnnnnnnnnnnnnnnnnnnnnnnnnnnnnnnnnnnnnnnnnnnnnnnnnnnnnnnnnnnnnnnnnnnnnnnnnnnnnnnnnnnnnnnnnnnnnnnnnnnnnnnnnnnnnnnnnnnnnnnnnnnnnnnnnnnnnnnnnnnnnnnnnnnnnnnnnnnnnnnnnnnnnnnnnnnnnnnnnnnnnnnnnnnnnnnnnnnnnnnnnnnnnnnnnnnnnnnnnnnnnnnnnnnnnnnnnnnnnnnnnnnnnnnnnnnnnnnnnnnnnnnnnnnnnnnnnnnnnnnnnnnnnnnnnnnnnnnnnnnnnnnnnnnnnnnnnnnnnnnnnnnnnnnnnnnnnnnnnnnnnnnnnnnnnnnnnnnnnnnnnnnnnnnnnnnnnnnnnnnnnnnnnnnnnnnnnnnnnnnnnnnnnnnnnnnnnnnnnnnnnnnnnnnnnnnnnnnnnnnnnnnnnnnnnnnnnnnnnnnnnnnnnnnnnnnnnnnnnnnnnnnnnnnnnnnnnnnnnnnnnnnnnnnnnnnnnnnnnnnnnnnnnnnnnnnnnnnnnnnnnnnnnnnnnnnnnnnnnnnnnnnnnnnnnnnnnnnnnnnnnnnnnnnnnnnnnnnnnnnnnnnnnnnnnnnnnnnnnnnnnnnnnnnnnnnnnnnnnnnnnnnnnnnnnnnnnnnnnnnnnnnnnnnnnnnnnnnnnnnnnnnnnnnnnnnnnnnnnnnnnnnnnnnnnnnnnnnnnnnnnnnnnnnnnnnnnnnnnnnnnnnnnnnnnnnnnnnnnnnnnnnnnnnnnnnnnnnnnnnnnnnnnnnnnnnnnnnnnnnnnnnnnnnnnnnnnnnnnnnnnnnnnnnnnnnnnnnnnnnnnnnnnnnnnnnnnnnnnnnnnnnnnnnnnnnnnnnnnnnnnnnnnnnnnnnnnnnnnnnnnnnnnnnnnnnnnnnnnnnnnnnnnnnnnnnnnnnnnnnnnnnnnnnnnnnnnnnnnnnnnnnnnnnnnnnnnnnnnnnnnnnnnnnnnnnnnnnnnnnnnnnnnnnnnnnnnnnnnnnnnnnnnnnnnnnnnnnnnnnnnnnnnnnnnnnnnnnnnnnnnnnnnnnnnnnnnnnnnnnnnnnnnnnnnnnnnnnnnnnnnnnnnnnnnnnnnnnnnnnnnnnnnnnnnnnnnnnnnnnnnnnnnnnnnnnnnnnnnnnnnnnnnnnnnnnnnnnnnnnnnnnnnnnnnnnnnnnnnnnnnnnnnnnnnnnnnnnnnnnnnnnnnnnnnnnnnnnnnnnnnnnnnnnnnnnnnnnnnnnnnnnnnnnnnnnnnnnnnnnnnnnnnnnnnnnnnnnnnnnnnnnnnnnnnnnnnnnnnnnnnnnnnnnnnnnnnnnnnnnnnnnnnnnnnnnnnnnnnnnnnnnnnnnnnnnnnnnnnnnnnnnnnnnnnnnnnnnnnnnnnnnnnnnnnnnnnnnnnnnnnnnnnnnnnnnnnnnnnnnnnnnnnnnnnnnnnnnnnnnnnnnnnnnnnnnnnnnnnnnnnnnnnnnnnnnnnnnnnnnnnnnnnnnnnnnnnnnnnnnnnnnnnnnnnnnnnnnnnnnnnnnnnnnnnnnnnnnnnnnnnnnnnnnnnnnnnnnnnnnnnnnnnnnnnnnnnnnnnnnnnnnnnnnnnnnnnnnnnnnnnnnnnnnnnnnnnnnnnnnnnnnnnnnnnnnnnnnnnnnnnnnnnnnnnnnnnnnnnnnnnnnnnnnnnnnnnnnnnnnnnnnnnnnnnnnnnnnnnnnnnnnnnnnnnnnnnnnnnnnnnnnnnnnnnnnnnnnnnnnnnnnnnnnnnnnnnnnnnnnnnnnnnnnnnnnnnnnnnnnnnnnnnnnnnnnnnnnnnnnnnnnnnnnnnnnnnnnnnnnnnnnnnnnnnnnnnnnnnnnnnnnnnnnnnnnnnnnnnnnnnnnnnnnnnnnnnnnnnnnnnnnnnnnnnnnnnnnnnnnnnnnnnnnnnnnnnnnnnnnnnnnnnnnnnnnnnnnnnnnnnnnnnnnnnnnnnnnnnnnnnnnnnnnnnnnnnnnnnnnnnnnnnnnnnnnnnnnnnnnnnnnnnnnnnnnnnnnnnnnnnnnnnnnnnnnnnnnnnnnnnnnnnnnnnnnnnnnnnnnnnnnnnnnnnnnnnnnnnnnnnnnnnnnnnnnnnnnnnnnnnnnnnnnnnnnnnnnnnnnnnnnnnnnnnnnnnnnnnnnnnnnnnnnnnnnnnnnnnnnnnnnnnnnnnnnnnnnnnnnnnnnnnnnnnnnnnnnnnnnnnnnnnnnnnnnnnnnnnnnnnnnnnnnnnnnnnnnnnnnnnnnnnnnnnnnnnnnnnnnnnnnnnnnnnnnnnnnnnnnnnnnnnnnnnnnnnnnnnnnnnnnnnnnnnnnnnnnnnnnnnnnnnnnnnnnnnnnnnnnnnnnnnnnnnnnnnnnnnnnnnnnnnnnnnnnnnnnnnnnnnnnnnnnnnnnnnnnnnnnnnnnnnnnnnnnnnnnnnnnnnnnnnnnnnnnnnnnnnnnnnnnnnnnnnnnnnnnnnnnnnnnnnnnnnnnnnnnnnnnnnnnnnnnnnnnnnnnnnnnnnnnnnnnnnnnnnnnnnnnnnnnnnnnnnnnnnnnnnnnnnnnnnnnnnnnnnnnnnnnnnnnnnnnnnnnnnnnnnnnnnnnnnnnnnnnnnnnnnnnnnnnnnnnnnnnnnnnnnnnnnnnnnnnnnnnnnnnnnnnnnnnnnnnnnnnnnnnnnnnnnnnnnnnnnnnnnnnnnnnnnnnnnnnnnnnnnnnnnnnnnnnnnnnnnnnnnnnnnnnnnnnnnnnnnnnnnnnnnnnnnnnnnnnnnnnnnnnnnnnnnnnnnnnnnnnnnnnnnnnnnnnnnnnnnnnnnnnnnnnnnnnnnnnnnnnnnnnnnnnnnnnnnnnnnnnnnnnnnnnnnnnnnnnnnnnnnnnnnnnnnnnnnnnnnnnnnnnnnnnnnnnnnnnnnnnnnnnnnnnnnnnnnnnnnnnnnnnnnnnnnnnnnnnnnnnnnnnnnnnnnnnnnnnnnnnnnnnnnnnnnnnnnnnnnnnnnnnnnnnnnnnnnnnnnnnnnnnnnnnnnnnnnnnnnnnnnnnnnnnnnnnnnnnnnnnnnnnnnnnnnnnnnnnnnnnnnnnnnnnnnnnnnnnnnnnnnnnnnnnnnnnnnnnnnnnnnnnnnnnnnnnnnnnnnnnnnnnnnnnnnnnnnnnnnnnnnnnnnnnnnnnnnnnnnnnnnnnnnnnnnnnnnnnnnnnnnnnnnnnnnnnnnnnnnnnnnnnnnnnnnnnnnnnnnnnnnnnnnnnnnnnnnnnnnnnnnnnnnnnnnnnnnnnnnnnnnnnnnnnnnnnnnnnnnnnnnnnnnnnnnnnnnnnnnnnnnnnnnnnnnnnnnnnnnnnnnnnnnnnnnnnnnnnnnnnnnnnnnnnnnnnnnnnnnnnnnnnnnnnnnnnnnnnnnnnnnnnnnnnnnnnnnnnnnnnnnnnnnnnnnnnnnnnnnnnnnnnnnnnnnnnnnnnnnnnnnnnnnnnnnnnnnnnnnnnnnnnnnnnnnnnnnnnnnnnnnnnnnnnnnnnnnnnnnnnnnnnnnnnnnnnnnnnnnnnnnnnnnnnnnnnnnnnnnnnnnnnnnnnnnnnnnnnnnnnnnnnnnnnnnnnnnnnnnnnnnnnnnnnnnnnnnnnnnnnnnnnnnnnnnnnnnnnnnnnnnnnnnnnnnnnnnnnnnnnnnnnnnnnnnnnnnnnnnnnnnnnnnnnnnnnnnnnnnnnnnnnnnnnnnnnnnnnnnnnnnnnnnnnnnnnnnnnnnnnnnnnnnnnnnnnnnnnnnnnnnnnnnnnnnnnnnnnnnnnnnnnnnnnnnnnnnnnnnnnnnnnnnnnnnnnnnnnnnnnnnnnnnnnnnnnnnnnnnnnnnnnnnnnnnnnnnnnnnnnnnnnnnnnnnnnnnnnnnnnnnnnnnnnnnnnnnnnnnnnnnnnnnnnnnnnnnnnnnnnnnnnnnnnnnnnnnnnnnnnnnnnnnnnnnnnnnnnnnnnnnnnnnnnnnnnnnnnnnnnnnnnnnnnnnnnnnnnnnnnnnnnnnnnnnnnnnnnnnnnnnnnnnnnnnnnnnnnnnnnnnnnnnnnnnnnnnnnnnnnnnnnnnnnnnnnnnnnnnnnnnnnnnnnnnnnnnnnnnnnnnnnnnnnnnnnnnnnnnnnnnnnnnnnnnnnnnnnnnnnnnnnnnnnnnnnnnnnnnnnnnnnnnnnnnnnnnnnnnnnnnnnnnnnnnnnnnnnnnnnnnnnnnnnnnnnnnnnnnnnnnnnnnnnnnnnnnnnnnnnnnnnnnnnnnnnnnnnnnnnnnnnnnnnnnnnnnnnnnnnnnnnnnnnnnnnnnnnnnnnnnnnnnnnnnnnnnnnnnnnnnnnnnnnnnnnnnnnnnnnnnnnnnnnnnnnnnnnnnnnnnnnnnnnnnnnnnnnnnnnnnnnnnnnnnnnnnnnnnnnnnnnnnnnnnnnnnnnnnnnnnnnnnnnnnnnnnnnnnnnnnnnnnnnnnnnnnnnnnnnnnnnnnnnnnnnnnnnnnnnnnnnnnnnnnnnnnnnnnnnnnnnnnnnnnnnnnnnnnnnnnnnnnnnnnnnnnnnnnnnnnnnnnnnnnnnnnnnnnnnnnnnnnnnnnnnnnnnnnnnnnnnnnnnnnnnnnnnnnnnnnnnnnnnnnnnnnnnnnnnnnnnnnnnnnnnnnnnnnnnnnnnnnnnnnnnnnnnnnnnnnnnnnnnnnnnnnnnnnnnnnnnnnnnnnnnnnnnnnnnnnnnnnnnnnnnnnnnnnnnnnnnnnnnnnnnnnnnnnnnnnnnnnnnnnnnnnnnnnnnnnnnnnnnnnnnnnnnnnnnnnnnnnnnnnnnnnnnnnnnnnnnnnnnnnnnnnnnnnnnnnnnnnnnnnnnnnnnnnnnnnnnnnnnnnnnnnnnnnnnnnnnnnnnnnnnnnnnnnnnnnnnnnnnnnnnnnnnnnnnnnnnnnnnnnnnnnnnnnnnnnnnnnnnnnnnnnnnnnnnnnnnnnnnnnnnnnnnnnnnnnnnnnnnnnnnnnnnnnnnnnnnnnnnnnnnnnnnnnnnnnnnnnnnnnnnnnnnnnnnnnnnnnnnnnnnnnnnnnnnnnnnnnnnnnnnnnnnnnnnnnnnnnnnnnnnnnnnnnnnnnnnnnnnnnnnnnnnnnnnnnnnnnnnnnnnnnnnnnnnnnnnnnnnnnnnnnnnnnnnnnnnnnnnnnnnnnnnnnnnnnnnnnnnnnnnnnnnnnnnnnnnnnnnnnnnnnnnnnnnnnnnnnnnnnnnnnnnnnnnnnnnnnnnnnnnnnnnnnnnnnnnnnnnnnnnnnnnnnnnnnnnnnnnnnnnnnnnnnnnnnnnnnnnnnnnnnnnnnnnnnnnnnnnnnnnnnnnnnnnnnnnnnnnnnnnnnnnnnnnnnnnnnnnnnnnnnnnnnnnnnnnnnnnnnnnnnnnnnnnnnnnnnnnnnnnnnnnnnnnnnnnnnnnnnnnnnnnnnnnnnnnnnnnnnnnnnnnnnnnnnnnnnnnnnnnnnnnnnnnnnnnnnnnnnnnnnnnnnnnnnnnnnnnnnnnnnnnnnnnnnnnnnnnnnnnnnnnnnnnnnnnnnnnnnnnnnnnnnnnnnnnnnnnnnnnnnnnnnnnnnnnnnnnnnnnnnnnnnnnnnnnnnnnnnnnnnnnnnnnnnnnnnnnnnnnnnnnnnnnnnnnnnnnnnnnnnnnnnnnnnnnnnnnnnnnnnnnnnnnnnnnnnnnnnnnnnnnnnnnnnnnnnnnnnnnnnnnnnnnnnnnnnnnnnnnnnnnnnnnnnnnnnnnnnnnnnnnnnnnnnnnnnnnnnnnnnnnnnnnnnnnnnnnnnnnnnnnnnnnnnnnnnnnnnnnnnnnnnnnnnnnnnnnnnnnnnnnnnnnnnnnnnnnnnnnnnnnnnnnnnnnnnnnnnnnnnnnnnnnnnnnnnnnnnnnnnnnnnnnnnnnnnnnnnnnnnnnnnnnnnnnnnnnnnnnnnnnnnnnnnnnnnnnnnnnnnnnnnnnnnnnnnnnnnnnnnnnnnnnnnnnnnnnnnnnnnnnnnnnnnnnnnnnnnnnnnnnnnnnnnnnnnnnnnnnnnnnnnnnnnnnnnnnnnnnnnnnnnnnnnnnnnnnnnnnnnnnnnnnnnnnnnnnnnnnnnnnnnnnnnnnnnnnnnnnnnnnnnnnnnnnnnnnnnnnnnnnnnnnnnnnnnnnnnnnnnnnnnnnnnnnnnnnnnnnnnnnnnnnnnnnnnnnnnnnnnnnnnnnnnnnnnnnnnnnnnnnnnnnnnnnnnnnnnnnnnnnnnnnnnnnnnnnnnnnnnnnnnnnnnnnnnnnnnnnnnnnnnnnnnnnnnnnnnnnnnnnnnnnnnnnnnnnnnnnnnnnnnnnnnnnnnnnnnnnnnnnnnnnnnnnnnnnnnnnnnnnnnnnnnnnnnnnnnnnnnnnnnnnnnnnnnnnnnnnnnnnnnnnnnnnnnnnnnnnnnnnnnnnnnnnnnnnnnnnnnnnnnnnnnnnnnnnnnnnnnnnnnnnnnnnnnnnnnnnnnnnnnnnnnnnnnnnnnnnnnnnnnnnnnnnnnnnnnnnnnnnnnnnnnnnnnnnnnnnnnnnnnnnnnnnnnnnnnnnnnnnnnnnnnnnnnnnnnnnnnnnnnnnnnnnnnnnnnnnnnnnnnnnnnnnnnnnnnnnnnnnnnnnnnnnnnnnnnnnnnnnnnnnnnnnnnnnnnnnnnnnnnnnnnnnnnnnnnnnnnnnnnnnnnnnnnnnnnnnnnnnnnnnnnnnnnnnnnnnnnnnnnnnnnnnnnnnnnnnnnnnnnnnnnnnnnnnnnnnnnnnnnnnnnnnnnnnnnnnnnnnnnnnnnnnnnnnnnnnnnnnnnnnnnnnnnnnnnnnnnnnnnnnnnnnnnnnnnnnnnnnnnnnnnnnnnnnnnnnnnnnnnnnnnnnnnnnnnnnnnnnnnnnnnnnnnnnnnnnnnnnnnnnnnnnnnnnnnnnnnnnnnnnnnnnnnnnnnnnnnnnnnnnnnnnnnnnnnnnnnnnnnnnnnnnnnnnnnnnnnnnnnnnnnnnnnnnnnnnnnnnnnnnnnnnnnnnnnnnnnnnnnnnnnnnnnnnnnnnnnnnnnnnnnnnnnnnnnnnnnnnnnnnnnnnnnnnnnnnnnnnnnnnnnnnnnnnnnnnnnnnnnnnnnnnnnnnnnnnnnnnnnnnnnnnnnnnnnnnnnnnnnnnnnnnnnnnnnnnnnnnnnnnnnnnnnnnnnnnnnnnnnnnnnnnnnnnnnnnnnnnnnnnnnnnnnnnnnnnnnnnnnnnnnnnnnnnnnnnnnnnnnnnnnnnnnnnnnnnnnnnnnnnnnnnnnnnnnnnnnnnnnnnnnnnnnnnnnnnnnnnnnnnnnnnnnnnnnnnnnnnnnnnnnnnnnnnnnnnnnnnnnnnnnnnnnnnnnnnnnnnnnnnnnnnnnnnnnnnnnnnnnnnnnnnnnnnnnnnnnnnnnnnnnnnnnnnnnnnnnnnnnnnnnnnnnnnnnnnnnnnnnnnnnnnnnnnnnnnnnnnnnnnnnnnnnnnnnnnnnnnnnnnnnnnnnnnnnnnnnnnnnnnnnnnnnnnnnnnnnnnnnnnnnnnnnnnnnnnnnnnnnnnnnnnnnnnnnnnnnnnnnnnnnnnnnnnnnnnnnnnnnnnnnnnnnnnnnnnnnnnnnnnnnnnnnnnnnnnnnnnnnnnnnnnnnnnnnnnnnnnnnnnnnnnnnnnnnnnnnnnnnnnnnnnnnnnnnnnnnnnnnnnnnnnnnnnnnnnnnnnnnnnnnnnnnnnnnnnnnnnnnnnnnnnnnnnnnnnnnnnnnnnnnnnnnnnnnnnnnnnnnnnnnnnnnnnnnnnnnnnnnnnnnnnnnnnnnnnnnnnnnnnnnnnnnnnnnnnnnnnnnnnnnnnnnnnnnnnnnnnnnnnnnnnnnnnnnnnnnnnnnnnnnnnnnnnnnnnnnnnnnnnnnnnnnnnnnnnnnnnnnnnnnnnnnnnnnnnnnnnnnnnnnnnnnnnnnnnnnnnnnnnnnnnnnnnnnnnnnnnnnnnnnnnnnnnnnnnnnnnnnnnnnnnnnnnnnnnnnnnnnnnnnnnnnnnnnnnnnnnnnnnnnnnnnnnnnnnnnnnnnnnnnnnnnnnnnnnnnnnnnnnnnnnnnnnnnnnnnnnnnnnnnnnnnnnnnnnnnnnnnnnnnnnnnnnnnnnnnnnnnnnnnnnnnnnnnnnnnnnnnnnnnnnnnnnnnnnnnnnnnnnnnnnnnnnnnnnnnnnnnnnnnnnnnnnnnnnnnnnnnnnnnnnnnnnnnnnnnnnnnnnnnnnnnnnnnnnnnnnnnnnnnnnnnnnnnnnnnnnnnnnnnnnnnnnnnnnnnnnnnnnnnnnnnnnnnnnnnnnnnnnnnnnnnnnnnnnnnnnnnnnnnnnnnnnnnnnnnnnnnnnnnnnnnnnnnnnnnnnnnnnnnnnnnnnnnnnnnnnnnnnnnnnnnnnnnnnnnnnnnnnnnnnnnnnnnnnnnnnnnnnnnnnnnnnnnnnnnnnnnnnnnnnnnnnnnnnnnnnnnnnnnnnnnnnnnnnnnnnnnnnnnnnnnnnnnnnnnnnnnnnnnnnnnnnnnnnnnnnnnnnnnnnnnnnnnnnnnnnnnnnnnnnnnnnnnnnnnnnnnnnnnnnnnnnnnnnnnnnnnnnnnnnnnnnnnnnnnnnnnnnnnnnnnnnnnnnnnnnnnnnnnnnnnnnnnnnnnnnnnnnnnnnnnnnnnnnnnnnnnnnnnnnnnnnnnnnnnnnnnnnnnnnnnnnnnnnnnnnnnnnnnnnnnnnnnnnnnnnnnnnnnnnnnnnnnnnnnnnnnnnnnnnnnnnnnnnnnnnnnnnnnnnnnnnnnnnnnnnnnnnnnnnnnnnnnnnnnnnnnnnnnnnnnnnnnnnnnnnnnnnnnnnnnnnnnnnnnnnnnnnnnnnnnnnnnnnnnnnnnnnnnnnnnnnnnnnnnnnnnnnnnnnnnnnnnnnnnnnnnnnnnnnnnnnnnnnnnnnnnnnnnnnnnnnnnnnnnnnnnnnnnnnnnnnnnnnnnnnnnnnnnnnnnnnnnnnnnnnnnnnnnnnnnnnnnnnnnnnnnnnnnnnnnnnnnnnnnnnnnnnnnnnnnnnnnnnnnnnnnnnnnnnnnnnnnnnnnnnnnnnnnnnnnnnnnnnnnnnnnnnnnnnnnnnnnnnnnnnnnnnnnnnnnnnnnnnnnnnnnnnnnnnnnnnnnnnnnnnnnnnnnnnnnnnnnnnnnnnnnnnnnnnnnnnnnnnnnnnnnnnnnnnnnnnnnnnnnnnnnnnnnnnnnnnnnnnnnnnnnnnnnnnnnnnnnnnnnnnnnnnnnnnnnnnnnnnnnnnnnnnnnnnnnnnnnnnnnnnnnnnnnnnnnnnnnnnnnnnnnnnnnnnnnnnnnnnnnnnnnnnnnnnnnnnnnnnnnnnnnnnnnnnnnnnnnnnnnnnnnnnnnnnnnnnnnnnnnnnnnnnnnnnnnnnnnnnnnnnnnnnnnnnnnnnnnnnnnnnnnnnnnnnnnnnnnnnnnnnnnnnnnnnnnnnnnnnnnnnnnnnnnnnnnnnnnnnnnnnnnnnnnnnnnnnnnnnnnnnnnnnnnnnnnnnnnnnnnnnnnnnnnnnnnnnnnnnnnnnnnnnnnnnnnnnnnnnnnnnnnnnnnnnnnnnnnnnnnnnnnnnnnnnnnnnnnnnnnnnnnnnnnnnnnnnnnnnnnnnnnnnnnnnnnnnnnnnnnnnnnnnnnnnnnnnnnnnnnnnnnnnnnnnnnnnnnnnnnnnnnnnnnnnnnnnnnnnnnnnnnnnnnnnnnnnnnnnnnnnnnnnnnnnnnnnnnnnnnnnnnnnnnnnnnnnnnnnnnnnnnnnnnnnnnnnnnnnnnnnnnnnnnnnnnnnnnnnnnnnnnnnnnnnnnnnnnnnnnnnnnnnnnnnnnnnnnnnnnnnnnnnnnnnnnnnnnnnnnnnnnnnnnnnnnnnnnnnnnnnnnnnnnnnnnnnnnnnnnnnnnnnnnnnnnnnnnnnnnnnnnnnnnnnnnnnnnnnnnnnnnnnnnnnnnnnnnnnnnnnnnnnnnnnnnnnnnnnnnnnnnnnnnnnnnnnnnnnnnnnnnnnnnnnnnnnnnnnnnnnnnnnnnnnnnnnnnnnnnnnnnnnnnnnnnnnnnnnnnnnnnnnnnnnnnnnnnnnnnnnnnnnnnnnnnnnnnnnnnnnnnnnnnnnnnnnnnnnnnnnnnnnnnnnnnnnnnnnnnnnnnnnnnnnnnnnnnnnnnnnnnnnnnnnnnnnnnnnnnnnnnnnnnnnnnnnnnnnnnnnnnnnnnnnnnnnnnnnnnnnnnnnnnnnnnnnnnnnnnnnnnnnnnnnnnnnnnnnnnnnnnnnnnnnnnnnnnnnnnnnnnnnnnnnnnnnnnnnnnnnnnnnnnnnnnnnnnnnnnnnnnnnnnnnnnnnnnnnnnnnnnnnnnnnnnnnnnnnnnnnnnnnnnnnnnnnnnnnnnnnnnnnnnnnnnnnnnnnnnnnnnnnnnnnnnnnnnnnnnnnnnnnnnnnnnnnnnnnnnnnnnnnnnnnnnnnnnnnnnnnnnnnnnnnnnnnnnnnnnnnnnnnnnnnnnnnnnnnnnnnnnnnnnnnnnnnnnnnnnnnnnnnnnnnnnnnnnnnnnnnnnnnnnnnnnnnnnnnnnnnnnnnnnnnnnnnnnnnnnnnnnnnnnnnnnnnnnnnnnnnnnnnnnnnnnnnnnnnnnnnnnnnnnnnnnnnnnnnnnnnnnnnnnnnnnnnnnnnnnnnnnnnnnnnnnnnnnnnnnnnnnnnnnnnnnnnnnnnnnnnnnnnnnnnnnnnnnnnnnnnnnnnnnnnnnnnnnnnnnnnnnnnnnnnnnnnnnnnnnnnnnnnnnnnnnnnnnnnnnnnnnnnnnnnnnnnnnnnnnnnnnnnnnnnnnnnnnnnnnnnnnnnnnnnnnnnnnnnnnnnnnnnnnnnnnnnnnnnnnnnnnnnnnnnnnnnnnnnnnnnnnnnnnnnnnnnnnnnnnnnnnnnnnnnnnnnnnnnnnnnnnnnnnnnnnnnnnnnnnnnnnnnnnnnnnnnnnnnnnnnnnnnnnnnnnnnnnnnnnnnnnnnnnnnnnnnnnnnnnnnnnnnnnnnnnnnnnnnnnnnnnnnnnnnnnnnnnnnnnnnnnnnnnnnnnnnnnnnnnnnnnnnnnnnnnnnnnnnnnnnnnnnnnnnnnnnnnnnnnnnnnnnnnnnnnnnnnnnnnnnnnnnnnnnnnnnnnnnnnnnnnnnnnnnnnnnnnnnnnnnnnnnnnnnnnnnnnnnnnnnnnnnnnnnnnnnnnnnnnnnnnnnnnnnnnnnnnnnnnnnnnnnnnnnnnnnnnnnnnnnnnnnnnnnnnnnnnnnnnnnnnnnnnnnnnnnnnnnnnnnnnnnnnnnnnnnnnnnnnnnnnnnnnnnnnnnnnnnnnnnnnnnnnnnnnnnnnnnnnnnnnnnnnnnnnnnnnnnnnnnnnnnnnnnnnnnnnnnnnnnnnnnnnnnnnnnnnnnnnnnnnnnnnnnnnnnnnnnnnnnnnnnnnnnnnnnnnnnnnnnnnnnnnnnnnnnnnnnnnnnnnnnnnnnnnnnnnnnnnnnnnnnnnnnnnnnnnnnnnnnnnnnnnnnnnnnnnnnnnnnnnnnnnnnnnnnnnnnnnnnnnnnnnnnnnnnnnnnnnnnnnnnnnnnnnnnnnnnnnnnnnnnnnnnnnnnnnnnnnnnnnnnnnnnnnnnnnnnnnnnnnnnnnnnnnnnnnnnnnnnnnnnnnnnnnnnnnnnnnnnnnnnnnnnnnnnnnnnnnnnnnnnnnnnnnnnnnnnnnnnnnnnnnnnnnnnnnnnnnnnnnnnnnnnnnnnnnnnnnnnnnnnnnnnnnnnnnnnnnnnnnnnnnnnnnnnnnnnnnnnnnnnnnnnnnnnnnnnnnnnnnnnnnnnnnnnnnnnnnnnnnnnnnnnnnnnnnnnnnnnnnnnnnnnnnnnnnnnnnnnnnnnnnnnnnnnnnnnnnnnnnnnnnnnnnnnnnnnnnnnnnnnnnnnnnnnnnnnnnnnnnnnnnnnnnnnnnnnnnnnnnnnnnnnnnnnnnnnnnnnnnnnnnnnnnnnnnnnnnnnnnnnnnnnnnnnnnnnnnnnnnnnnnnnnnnnnnnnnnnnnnnnnnnnnnnnnnnnnnnnnnnnnnnnnnnnnnnnnnnnnnnnnnnnnnnnnnnnnnnnnnnnnnnnnnnnnnnnnnnnnnnnnnnnnnnnnnnnnnnnnnnnnnnnnnnnnnnnnnnnnnnnnnnnnnnnnnnnnnnnnnnnnnnnnnnnnnnnnnnnnnnnnnnnnnnnnnnnnnnnnnnnnnnnnnnnnnnnnnnnnnnnnnnnnnnnnnnnnnnnnnnnnnnnnnnnnnnnnnnnnnnnnnnnnnnnnnnnnnnnnnnnnnnnnnnnnnnnnnnnnnnnnnnnnnnnnnnnnnnnnnnnnnnnnnnnnnnnnnnnnnnnnnnnnnnnnnnnnnnnnnnnnnnnnnnnnnnnnnnnnnnnnnnnnnnnnnnnnnnnnnnnnnnnnnnnnnnnnnnnnnnnnnnnnnnnnnnnnnnnnnnnnnnnnnnnnnnnnnnnnnnnnnnnnnnnnnnnnnnnnnnnnnnnnnnnnnnnnnnnnnnnnnnnnnnnnnnnnnnnnnnnnnnnnnnnnnnnnnnnnnnnnnnnnnnnnnnnnnnnnnnnnnnnnnnnnnnnnnnnnnnnnnnnnnnnnnnnnnnnnnnnnnnnnnnnnnnnnnnnnnnnnnnnnnnnnnnnnnnnnnnnnnnnnnnnnnnnnnnnnnnnnnnnnnnnnnnnnnnnnnnnnnnnnnnnnnnnnnnnnnnnnnnnnnnnnnnnnnnnnnnnnnnnnnnnnnnnnnnnnnnnnnnnnnnnnnnnnnnnnnnnnnnnnnnnnnnnnnnnnnnnnnnnnnnnnnnnnnnnnnnnnnnnnnnnnnnnnnnnnnnnnnnnnnnnnnnnnnnnnnnnnnnnnnnnnnnnnnnnnnnnnnnnnnnnnnnnnnnnnnnnnnnnnnnnnnnnnnnnnnnnnnnnnnnnnnnnnnnnnnnnnnnnnnnnnnnnnnnnnnnnnnnnnnnnnnnnnnnnnnnnnnnnnnnnnnnnnnnnnnnnnnnnnnnnnnnnnnnnnnnnnnnnnnnnnnnnnnnnnnnnnnnnnnnnnnnnnnnnnnnnnnnnnnnnnnnnnnnnnnnnnnnnnnnnnnnnnnnnnnnnnnnnnnnnnnnnnnnnnnnnnnnnnnnnnnnnnnnnnnnnnnnnnnnnnnnnnnnnnnnnnnnnnnnnnnnnnnnnnnnnnnnnnnnnnnnnnnnnnnnnnnnnnnnnnnnnnnnnnnnnnnnnnnnnnnnnnnnnnnnnnnnnnnnnnnnnnnnnnnnnnnnnnnnnnnnnnnnnnnnnnnnnnnnnnnnnnnnnnnnnnnnnnnnnnnnnnnnnnnnnnnnnnnnnnnnnnnnnnnnnnnnnnnnnnnnnnnnnnnnnnnnnnnnnnnnnnnnnnnnnnnnnnnnnnnnnnnnnnnnnnnnnnnnnnnnnnnnnnnnnnnnnnnnnnnnnnnnnnnnnnnnnnnnnnnnnnnnnnnnnnnnnnnnnnnnnnnnnnnnnnnnnnnnnnnnnnnnnnnnnnnnnnnnnnnnnnnnnnnnnnnnnnnnnnnnnnnnnnnnnnnnnnnnnnnnnnnnnnnnnnnnnnnnnnnnnnnnnnnnnnnnnnnnnnnnnnnnnnnnnnnnnnnnnnnnnnnnnnnnnnnnnnnnnnnnnnnnnnnnnnnnnnnnnnnnnnnnnnnnnnnnnnnnnnnnnnnnnnnnnnnnnnnnnnnnnnnnnnnnnnnnnnnnnnnnnnnnnnnnnnnnnnnnnnnnnnnnnnnnnnnnnnnnnnnnnnnnnnnnnnnnnnnnnnnnnnnnnnnnnnnnnnnnnnnnnnnnnnnnnnnnnnnnnnnnnnnnnnnnnnnnnnnnnnnnnnnnnnnnnnnnnnnnnnnnnnnnnnnnnnnnnnnnnnnnnnnnnnnnnnnnnnnnnnnnnnnnnnnnnnnnnnnnnnnnnnnnnnnnnnnnnnnnnnnnnnnnnnnnnnnnnnnnnnnnnnnnnnnnnnnnnnnnnnnnnnnnnnnnnnnnnnnnnnnnnnnnnnnnnnnnnnnnnnnnnnnnnnnnnnnnnnnnnnnnnnnnnnnnnnnnnnnnnnnnnnnnnnnnnnnnnnnnnnnnnnnnnnnnnnnnnnnnnnnnnnnnnnnnnnnnnnnnnnnnnnnnnnnnnnnnnnnnnnnnnnnnnnnnnnnnnnnnnnnnnnnnnnnnnnnnnnnnnnnnnnnnnnnnnnnnnnnnnnnnnnnnnnnnnnnnnnnnnnnnnnnnnnnnnnnnnnnnnnnnnnnnnnnnnnnnnnnnnnnnnnnnnnnnnnnnnnnnnnnnnnnnnnnnnnnnnnnnnnnnnnnnnnnnnnnnnnnnnnnnnnnnnnnnnnnnnnnnnnnnnnnnnnnnnnnnnnnnnnnnnnnnnnnnnnnnnnnnnnnnnnnnnnnnnnnnnnnnnnnnnnnnnnnnnnnnnnnnnnnnnnnnnnnnnnnnnnnnnnnnnnnnnnnnnnnnnnnnnnnnnnnnnnnnnnnnnnnnnnnnnnnnnnnnnnnnnnnnnnnnnnnnnnnnnnnnnnnnnnnnnnnnnnnnnnnnnnnnnnnnnnnnnnnnnnnnnnnnnnnnnnnnnnnnnnnnnnnnnnnnnnnnnnnnnnnnnnnnnnnnnnnnnnnnnnnnnnnnnnnnnnnnnnnnnnnnnnnnnnnnnnnnnnnnnnnnnnnnnnnnnnnnnnnnnnnnnnnnnnnnnnnnnnnnnnnnnnnnnnnnnnnnnnnnnnnnnnnnnnnnnnnnnnnnnnnnnnnnnnnnnnnnnnnnnnnnnnnnnnnnnnnnnnnnnnnnnnnnnnnnnnnnnnnnnnnnnnnnnnnnnnnnnnnnnnnnnnnnnnnnnnnnnnnnnnnnnnnnnnnnnnnnnnnnnnnnnnnnnnnnnnnnnnnnnnnnnnnnnnnnnnnnnnnnnnnnnnnnnnnnnnnnnnnnnnnnnnnnnnnnnnnnnnnnnnnnnnnnnnnnnnnnnnnnnnnnnnnnnnnnnnnnnnnnnnnnnnnnnnnnnnnnnnnnnnnnnnnnnnnnnnnnnnnnnnnnnnnnnnnnnnnnnnnnnnnnnnnnnnnnnnnnnnnnnnnnnnnnnnnnnnnnnnnnnnnnnnnnnnnnnnnnnnnnnnnnnnnnnnnnnnnnnnnnnnnnnnnnnnnnnnnnnnnnnnnnnnnnnnnnnnnnnnnnnnnnnnnnnnnnnnnnnnnnnnnnnnnnnnnnnnnnnnnnnnnnnnnnnnnnnnnnnnnnnnnnnnnnnnnnnnnnnnnnnnnnnnnnnnnnnnnnnnnnnnnnnnnnnnnnnnnnnnnnnnnnnnnnnnnnnnnnnnnnnnnnnnnnnnnnnnnnnnnnnnnnnnnnnnnnnnnnnnnnnnnnnnnnnnnnnnnnnnnnnnnnnnnnnnnnnnnnnnnnnnnnnnnnnnnnnnnnnnnnnnnnnnnnnnnnnnnnnnnnnnnnnnnnnnnnnnnnnnnnnnnnnnnnnnnnnnnnnnnnnnnnnnnnnnnnnnnnnnnnnnnnnnnnnnnnnnnnnnnnnnnnnnnnnnnnnnnnnnnnnnnnnnnnnnnnnnnnnnnnnnnnnnnnnnnnnnnnnnnnnnnnnnnnnnnnnnnnnnnnnnnnnnnnnnnnnnnnnnnnnnnnnnnnnnnnnnnnnnnnnnnnnnnnnnnnnnnnnnnnnnnnnnnnnnnnnnnnnnnnnnnnnnnnnnnnnnnnnnnnnnnnnnnnnnnnnnnnnnnnnnnnnnnnnnnnnnnnnnnnnnnnnnnnnnnnnnnnnnnnnnnnnnnnnnnnnnnnnnnnnnnnnnnnnnnnnnnnnnnnnnnnnnnnnnnnnnnnnnnnnnnnnnnnnnnnnnnnnnnnnnnnnnnnnnnnnnnnnnnnnnnnnnnnnnnnnnnnnnnnnnnnnnnnnnnnnnnnnnnnnnnnnnnnnnnnnnnnnnnnnnnnnnnnnnnnnnnnnnnnnnnnnnnnnnnnnnnnnnnnnnnnnnnnnnnnnnnnnnnnnnnnnnnnnnnnnnnnnnnnnnnnnnnnnnnnnnnnnnnnnnnnnnnnnnnnnnnnnnnnnnnnnnnnnnnnnnnnnnnnnnnnnnnnnnnnnnnnnnnnnnnnnnnnnnnnnnnnnnnnnnnnnnnnnnnnnnnnnnnnnnnnnnnnnnnnnnnnnnnnnnnnnnnnnnnnnnnnnnnnnnnnnnnnnnnnnnnnnnnnnnnnnnnnnnnnnnnnnnnnnnnnnnnnnnnnnnnnnnnnnnnnnnnnnnnnnnnnnnnnnnnnnnnnnnnnnnnnnnnnnnnnnnnnnnnnnnnnnnnnnnnnnnnnnnnnnnnnnnnnnnnnnnnnnnnnnnnnnnnnnnnnnnnnnnnnnnnnnnnnnnnnnnnnnnnnnnnnnnnnnnnnnnnnnnnnnnnnnnnnnnnnnnnnnnnnnnnnnnnnnnnnnnnnnnnnnnnnnnnnnnnnnnnnnnnnnnnnnnnnnnnnnnnnnnnnnnnnnnnnnnnnnnnnnnnnnnnnnnnnnnnnnnnnnnnnnnnnnnnnnnnnnnnnnnnnnnnnnnnnnnnnnnnnnnnnnnnnnnnnnnnnnnnnnnnnnnnnnnnnnnnnnnnnnnnnnnnnnnnnnnnnnnnnnnnnnnnnnnnnnnnnnnnnnnnnnnnnnnnnnnnnnnnnnnnnnnnnnnnnnnnnnnnnnnnnnnnnnnnnnnnnnnnnnnnnnnnnnnnnnnnnnnnnnnnnnnnnnnnnnnnnnnnnnnnnnnnnnnnnnnnnnnnnnnnnnnnnnnnnnnnnnnnnnnnnnnnnnnnnnnnnnnnnnnnnnnnnnnnnnnnnnnnnnnnnnnnnnnnnnnnnnnnnnnnnnnnnnnnnnnnnnnnnnnnnnnnnnnnnnnnnnnnnnnnnnnnnnnnnnnnnnnnnnnnnnnnnnnnnnnnnnnnnnnnnnnnnnnnnnnnnnnnnnnnnnnnnnnnnnnnnnnnnnnnnnnnnnnnnnnnnnnnnnnnnnnnnnnnnnnnnnnnnnnnnnnnnnnnnnnnnnnnnnnnnnnnnnnnnnnnnnnnnnnnnnnnnnnnnnnnnnnnnnnnnnnnnnnnnnnnnnnnnnnnnnnnnnnnnnnnnnnnnnnnnnnnnnnnnnnnnnnnnnnnnnnnnnnnnnnnnnnnnnnnnnnnnnnnnnnnnnnnnnnnnnnnnnnnnnnnnnnnnnnnnnnnnnnnnnnnnnnnnnnnnnnnnnnnnnnnnnnnnnnnnnnnnnnnnnnnnnnnnnnnnnnnnnnnnnnnnnnnnnnnnnnnnnnnnnnnnnnnnnnnnnnnnnnnnnnnnnnnnnnnnnnnnnnnnnnnnnnnnnnnnnnnnnnnnnnnnnnnnnnnnnnnnnnnnnnnnnnnnnnnnnnnnnnnnnnnnnnnnnnnnnnnnnnnnnnnnnnnnnnnnnnnnnnnnnnnnnnnnnnnnnnnnnnnnnnnnnnnnnnnnnnnnnnnnnnnnnnnnnnnnnnnnnnnnnnnnnnnnnnnnnnnnnnnnnnnnnnnnnnnnnnnnnnnnnnnnnnnnnnnnnnnnnnnnnnnnnnnnnnnnnnnnnnnnnnnnnnnnnnnnnnnnnnnnnnnnnnnnnnnnnnnnnnnnnnnnnnnnnnnnnnnnnnnnnnnnnnnnnnnnnnnnnnnnnnnnnnnnnnnnnnnnnnnnnnnnnnnnnnnnnnnnnnnnnnnnnnnnnnnnnnnnnnnnnnnnnnnnnnnnnnnnnnnnnnnnnnnnnnnnnnnnnnnnnnnnnnnnnnnnnnnnnnnnnnnnnnnnnnnnnnnnnnnnnnnnnnnnnnnnnnnnnnnnnnnnnnnnnnnnnnnnnnnnnnnnnnnnnnnnnnnnnnnnnnnnnnnnnnnnnnnnnnnnnnnnnnnnnnnnnnnnnnnnnnnnnnnnnnnnnnnnnnnnnnnnnnnnnnnnnnnnnnnnnnnnnnnnnnnnnnnnnnnnnnnnnnnnnnnnnnnnnnnnnnnnnnnnnnnnnnnnnnnnnnnnnnnnnnnnnnnnnnnnnnnnnnnnnnnnnnnnnnnnnnnnnnnnnnnnnnnnnnnnnnnnnnnnnnnnnnnnnnnnnnnnnnnnnnnnnnnnnnnnnnnnnnnnnnnnnnnnnnnnnnnnnnnnnnnnnnnnnnnnnnnnnnnnnnnnnnnnnnnnnnnnnnnnnnnnnnnnnnnnnnnnnnnnnnnnnnnnnnnnnnnnnnnnnnnnnnnnnnnnnnnnnnnnnnnnnnnnnnnnnnnnnnnnnnnnnnnnnnnnnnnnnnnnnnnnnnnnnnnnnnnnnnnnnnnnnnnnnnnnnnnnnnnnnnnnnnnnnnnnnnnnnnnnnnnnnnnnnnnnnnnnnnnnnnnnnnnnnnnnnnnnnnnnnnnnnnnnnnnnnnnnnnnnnnnnnnnnnnnnnnnnnnnnnnnnnnnnnnnnnnnnnnnnnnnnnnnnnnnnnnnnnnnnnnnnnnnnnnnnnnnnnnnnnnnnnnnnnnnnnnnnnnnnnnnnnnnnnnnnnnnnnnnnnnnnnnnnnnnnnnnnnnnnnnnnnnnnnnnnnnnnnnnnnnnnnnnnnnnnnnnnnnnnnnnnnnnnnnnnnnnnnnnnnnnnnnnnnnnnnnnnnnnnnnnnnnnnnnnnnnnnnnnnnnnnnnnnnnnnnnnnnnnnnnnnnnnnnnnnnnnnnnnnnnnnnnnnnnnnnnnnnnnnnnnnnnnnnnnnnnnnnnnnnnnnnnnnnnnnnnnnnnnnnnnnnnnnnnnnnnnnnnnnnnnnnnnnnnnnnnnnnnnnnnnnnnnnnnnnnnnnnnnnnnnnnnnnnnnnnnnnnnnnnnnnnnnnnnnnnnnnnnnnnnnnnnnnnnnnnnnnnnnnnnnnnnnnnnnnnnnnnnnnnnnnnnnnnnnnnnnnnnnnnnnnnnnnnnnnnnnnnnnnnnnnnnnnnnnnnnnnnnnnnnnnnnnnnnnnnnnnnnnnnnnnnnnnnnnnnnnnnnnnnnnnnnnnnnnnnnnnnnnnnnnnnnnnnnnnnnnnnnnnnnnnnnnnnnnnnnnnnnnnnnnnnnnnnnnnnnnnnnnnnnnnnnnnnnnnnnnnnnnnnnnnnnnnnnnnnnnnnnnnnnnnnnnnnnnnnnnnnnnnnnnnnnnnnnnnnnnnnnnnnnnnnnnnnnnnnnnnnnnnnnnnnnnnnnnnnnnnnnnnnnnnnnnnnnnnnnnnnnnnnnnnnnnnnnnnnnnnnnnnnnnnnnnnnnnnnnnnnnnnnnnnnnnnnnnnnnnnnnnnnnnnnnnnnnnnnnnnnnnnnnnnnnnnnnnnnnnnnnnnnnnnnnnnnnnnnnnnnnnnnnnnnnnnnnnnnnnnnnnnnnnnnnnnnnnnnnnnnnnnnnnnnnnnnnnnnnnnnnnnnnnnnnnnnnnnnnnnnnnnnnnnnnnnnnnnnnnnnnnnnnnnnnnnnnnnnnnnnnnnnnnnnnnnnnnnnnnnnnnnnnnnnnnnnnnnnnnnnnnnnnnnnnnnnnnnnnnnnnnnnnnnnnnnnnnnnnnnnnnnnnnnnnnnnnnnnnnnnnnnnnnnnnnnnnnnnnnnnnnnnnnnnnnnnnnnnnnnnnnnnnnnnnnnnnnnnnnnnnnnnnnnnnnnnnnnnnnnnnnnnnnnnnnnnnnnnnnnnnnnnnnnnnnnnnnnnnnnnnnnnnnnnnnnnnnnnnnnnnnnnnnnnnnnnnnnnnnnnnnnnnnnnnnnnnnnnnnnnnnnnnnnnnnnnnnnnnnnnnnnnnnnnnnnnnnnnnnnnnnnnnnnnnnnnnnnnnnnnnnnnnnnnnnnnnnnnnnnnnnnnnnnnnnnnnnnnnnnnnnnnnnnnnnnnnnnnnnnnnnnnnnnnnnnnnnnnnnnnnnnnnnnnnnnnnnnnnnnnnnnnnnnnnnnnnnnnnnnnnnnnnnnnnnnnnnnnnnnnnnnnnnnnnnnnnnnnnnnnnnnnnnnnnnnnnnnnnnnnnnnnnnnnnnnnnnnnnnnnnnnnnnnnnnnnnnnnnnnnnnnnnnnnnnnnnnnnnnnnnnnnnnnnnnnnnnnnnnnnnnnnnnnnnnnnnnnnnnnnnnnnnnnnnnnnnnnnnnnnnnnnnnnnnnnnnnnnnnnnnnnnnnnnnnnnnnnnnnnnnnnnnnnnnnnnnnnnnnnnnnnnnnnnnnnnnnnnnnnnnnnnnnnnnnnnnnnnnnnnnnnnnnnnnnnnnnnnnnnnnnnnnnnnnnnnnnnnnnnnnnnnnnnnnnnnnnnnnnnnnnnnnnnnnnnnnnnnnnnnnnnnnnnnnnnnnnnnnnnnnnnnnnnnnnnnnnnnnnnnnnnnnnnnnnnnnnnnnnnnnnnnnnnnnnnnnnnnnnnnnnnnnnnnnnnnnnnnnnnnnnnnnnnnnnnnnnnnnnnnnnnnnnnnnnnnnnnnnnnnnnnnnnnnnnnnnnnnnnnnnnnnnnnnnnnnnnnnnnnnnnnnnnnnnnnnnnnnnnnnnnnnnnnnnnnnnnnnnnnnnnnnnnnnnnnnnnnnnnnnnnnnnnnnnnnnnnnnnnnnnnnnnnnnnnnnnnnnnnnnnnnnnnnnnnnnnnnnnnnnnnnnnnnnnnnnnnnnnnnnnnnnnnnnnnnnnnnnnnnnnnnnnnnnnnnnnnnnnnnnnnnnnnnnnnnnnnnnnnnnnnnnnnnnnnnnnnnnnnnnnnnnnnnnnnnnnnnnnnnnnnnnnnnnnnnnnnnnnnnnnnnnnnnnnnnnnnnnnnnnnnnnnnnnnnnnnnnnnnnnnnnnnnnnnnnnnnnnnnnnnnnnnnnnnnnnnnnnnnnnnnnnnnnnnnnnnnnnnnnnnnnnnnnnnnnnnnnnnnnnnnnnnnnnnnnnnnnnnnnnnnnnnnnnnnnnnnnnnnnnnnnnnnnnnnnnnnnnnnnnnnnnnnnnnnnnnnnnnnnnnnnnnnnnnnnnnnnnnnnnnnnnnnnnnnnnnnnnnnnnnnnnnnnnnnnnnnnnnnnnnnnnnnnnnnnnnnnnnnnnnnnnnnnnnnnnnnnnnnnnnnnnnnnnnnnnnnnnnnnnnnnnnnnnnnnnnnnnnnnnnnnnnnnnnnnnnnnnnnnnnnnnnnnnnnnnnnnnnnnnnnnnnnnnnnnnnnnnnnnnnnnnnnnnnnnnnnnnnnnnnnnnnnnnnnnnnnnnnnnnnnnnnnnnnnnnnnnnnnnnnnnnnnnnnnnnnnnnnnnnnnnnnnnnnnnnnnnnnnnnnnnnnnnnnnnnnnnnnnnnnnnnnnnnnnnnnnnnnnnnnnnnnnnnnnnnnnnnnnnnnnnnnnnnnnnnnnnnnnnnnnnnnnnnnnnnnnnnnnnnnnnnnnnnnnnnnnnnnnnnnnnnnnnnnnnnnnnnnnnnnnnnnnnnnnnnnnnnnnnnnnnnnnnnnnnnnnnnnnnnnnnnnnnnnnnnnnnnnnnnnnnnnnnnnnnnnnnnnnnnnnnnnnnnnnnnnnnnnnnnnnnnnnnnnnnnnnnnnnnnnnnnnnnnnnnnnnnnnnnnnnnnnnnnnnnnnnnnnnnnnnnnnnnnnnnnnnnnnnnnnnnnnnnnnnnnnnnnnnnnnnnnnnnnnnnnnnnnnnnnnnnnnnnnnnnnnnnnnnnnnnnnnnnnnnnnnnnnnnnnnnnnnnnnnnnnnnnnnnnnnnnnnnnnnnnnnnnnnnnnnnnnnnnnnnnnnnnnnnnnnnnnnnnnnnnnnnnnnnnnnnnnnnnnnnnnnnnnnnnnnnnnnnnnnnnnnnnnnnnnnnnnnnnnnnnnnnnnnnnnnnnnnnnnnnnnnnnnnnnnnnnnnnnnnnnnnnnnnnnnnnnnnnnnnnnnnnnnnnnnnnnnnnnnnnnnnnnnnnnnnnnnnnnnnnnnnnnnnnnnnnnnnnnnnnnnnnnnnnnnnnnnnnnnnnnnnnnnnnnnnnnnnnnnnnnnnnnnnnnnnnnnnnnnnnnnnnnnnnnnnnnnnnnnnnnnnnnnnnnnnnnnnnnnnnnnnnnnnnnnnnnnnnnnnnnnnnnnnnnnnnnnnnnnnnnnnnnnnnnnnnnnnnnnnnnnnnnnnnnnnnnnnnnnnnnnnnnnnnnnnnnnnnnnnnnnnnnnnnnnnnnnnnnnnnnnnnnnnnnnnnnnnnnnnnnnnnnnnnnnnnnnnnnnnnnnnnnnnnnnnnnnnnnnnnnnnnnnnnnnnnnnnnnnnnnnnnnnnnnnnnnnnnnnnnnnnnnnnnnnnnnnnnnnnnnnnnnnnnnnnnnnnnnnnnnnnnnnnnnnnnnnnnnnnnnnnnnnnnnnnnnnnnnnnnnnnnnnnnnnnnnnnnnnnnnnnnnnnnnnnnnnnnnnnnnnnnnnnnnnnnnnnnnnnnnnnnnnnnnnnnnnnnnnnnnnnnnnnnnnnnnnnnnnnnnnnnnnnnnnnnnnnnnnnnnnnnnnnnnnnnnnnnnnnnnnnnnnnnnnnnnnnnnnnnnnnnnnnnnnnnnnnnnnnnnnnnnnnnnnnnnnnnnnnnnnnnnnnnnnnnnnnnnnnnnnnnnnnnnnnnnnnnnnnnnnnnnnnnnnnnnnnnnnnnnnnnnnnnnnnnnnnnnnnnnnnnnnnnnnnnnnnnnnnnnnnnnnnnnnnnnnnnnnnnnnnnnnnnnnnnnnnnnnnnnnnnnnnnnnnnnnnnnnnnnnnnnnnnnnnnnnnnnnnnnnnnnnnnnnnnnnnnnnnnnnnnnnnnnnnnnnnnnnnnnnnnnnnnnnnnnnnnnnnnnnnnnnnnnnnnnnnnnnnnnnnnnnnnnnnnnnnnnnnnnnnnnnnnnnnnnnnnnnnnnnnnnnnnnnnnnnnnnnnnnnnnnnnnnnnnnnnnnnnnnnnnnnnnnnnnnnnnnnnnnnnnnnnnnnnnnnnnnnnnnnnnnnnnnnnnnnnnnnnnnnnnnnnnnnnnnnnnnnnnnnnnnnnnnnnnnnnnnnnnnnnnnnnnnnnnnnnnnnnnnnnnnnnnnnnnnnnnnnnnnnnnnnnnnnnnnnnnnnnnnnnnnnnnnnnnnnnnnnnnnnnnnnnnnnnnnnnnnnnnnnnnnnnnnnnnnnnnnnnnnnnnnnnnnnnnnnnnnnnnnnnnnnnnnnnnnnnnnnnnnnnnnnnnnnnnnnnnnnnnnnnnnnnnnnnnnnnnnnnnnnnnnnnnnnnnnnnnnnnnnnnnnnnnnnnnnnnnnnnnnnnnnnnnnnnnnnnnnnnnnnnnnnnnnnnnnnnnnnnnnnnnnnnnnnnnnnnnnnnnnnnnnnnnnnnnnnnnnnnnnnnnnnnnnnnnnnnnnnnnnnnnnnnnnnnnnnnnnnnnnnnnnnnnnnnnnnnnnnnnnnnnnnnnnnnnnnnnnnnnnnnnnnnnnnnnnnnnnnnnnnnnnnnnnnnnnnnnnnnnnnnnnnnnnnnnnnnnnnnnnnnnnnnnnnnnnnnnnnnnnnnnnnnnnnnnnnnnnnnnnnnnnnnnnnnnnnnnnnnnnnnnnnnnnnnnnnnnnnnnnnnnnnnnnnnnnnnnnnnnnnnnnnnnnnnnnnnnnnnnnnnnnnnnnnnnnnnnnnnnnnnnnnnnnnnnnnnnnnnnnnnnnnnnnnnnnnnnnnnnnnnnnnnnnnnnnnnnnnnnnnnnnnnnnnnnnnnnnnnnnnnnnnnnnnnnnnnnnnnnnnnnnnnnnnnnnnnnnnnnnnnnnnnnnnnnnnnnnnnnnnnnnnnnnnnnnnnnnnnnnnnnnnnnnnnnnnnnnnnnnnnnnnnnnnnnnnnnnnnnnnnnnnnnnnnnnnnnnnnnnnnnnnnnnnnnnnnnnnnnnnnnnnnnnnnnnnnnnnnnnnnnnnnnnnnnnnnnnnnnnnnnnnnnnnnnnnnnnnnnnnnnnnnnnnnnnnnnnnnnnnnnnnnnnnnnnnnnnnnnnnnnnnnnnnnnnnnnnnnnnnnnnnnnnnnnnnnnnnnnnnnnnnnnnnnnnnnnnnnnnnnnnnnnnnnnnnnnnnnnnnnnnnnnnnnnnnnnnnnnnnnnnnnnnnnnnnnnnnnnnnnnnnnnnnnnnnnnnnnnnnnnnnnnnnnnnnnnnnnnnnnnnnnnnnnnnnnnnnnnnnnnnnnnnnnnnnnnnnnnnnnnnnnnnnnnnnnnnnnnnnnnnnnnnnnnnnnnnnnnnnnnnnnnnnnnnnnnnnnnnnnnnnnnnnnnnnnnnnnnnnnnnnnnnnnnnnnnnnnnnnnnnnnnnnnnnnnnnnnnnnnnnnnnnnnnnnnnnnnnnnnnnnnnnnnnnnnnnnnnnnnnnnnnnnnnnnnnnnnnnnnnnnnnnnnnnnnnnnnnnnnnnnnnnnnnnnnnnnnnnnnnnnnnnnnnnnnnnnnnnnnnnnnnnnnnnnnnnnnnnnnnnnnnnnnnnnnnnnnnnnnnnnnnnnnnnnnnnnnnnnnnnnnnnnnnnnnnnnnnnnnnnnnnnnnnnnnnnnnnnnnnnnnnnnnnnnnnnnnnnnnnnnnnnnnnnnnnnnnnnnnnnnnnnnnnnnnnnnnnnnnnnnnnnnnnnnnnnnnnnnnnnnnnnnnnnnnnnnnnnnnnnnnnnnnnnnnnnnnnnnnnnnnnnnnnnnnnnnnnnnnnnnnnnnnnnnnnnnnnnnnnnnnnnnnnnnnnnnnnnnnnnnnnnnnnnnnnnnnnnnnnnnnnnnnnnnnnnnnnnnnnnnnnnnnnnnnnnnnnnnnnnnnnnnnnnnnnnnnnnnnnnnnnnnnnnnnnnnnnnnnnnnnnnnnnnnnnnnnnnnnnnnnnnnnnnnnnnnnnnnnnnnnnnnnnnnnnnnnnnnnnnnnnnnnnnnnnnnnnnnnnnnnnnnnnnnnnnnnnnnnnnnnnnnnnnnnnnnnnnnnnnnnnnnnnnnnnnnnnnnnnnnnnnnnnnnnnnnnnnnnnnnnnnnnnnnnnnnnnnnnnnnnnnnnnnnnnnnnnnnnnnnnnnnnnnnnnnnnnnnnnnnnnnnnnnnnnnnnnnnnnnnnnnnnnnnnnnnnnnnnnnnnnnnnnnnnnnnnnnnnnnnnnnnnnnnnnnnnnnnnnnnnnnnnnnnnnnnnnnnnnnnnnnnnnnnnnnnnnnnnnnnnnnnnnnnnnnnnnnnnnnnnnnnnnnnnnnnnnnnnnnnnnnnnnnnnnnnnnnnnnnnnnnnnnnnnnnnnnnnnnnnnnnnnnnnnnnnnnnnnnnnnnnnnnnnnnnnnnnnnnnnnnnnnnnnnnnnnnnnnnnnnnnnnnnnnnnnnnnnnnnnnnnnnnnnnnnnnnnnnnnnnnnnnnnnnnnnnnnnnnnnnnnnnnnnnnnnnnnnnnnnnnnnnnnnnnnnnnnnnnnnnnnnnnnnnnnnnnnnnnnnnnnnnnnnnnnnnnnnnnnnnnnnnnnnnnnnnnnnnnnnnnnnnnnnnnnnnnnnnnnnnnnnnnnnnnnnnnnnnnnnnnnnnnnnnnnnnnnnnnnnnnnnnnnnnnnnnnnnnnnnnnnnnnnnnnnnnnnnnnnnnnnnnnnnnnnnnnnnnnnnnnnnnnnnnnnnnnnnnnnnnnnnnnnnnnnnnnnnnnnnnnnnnnnnnnnnnnnnnnnnnnnnnnnnnnnnnnnnnnnnnnnnnnnnnnnnnnnnnnnnnnnnnnnnnnnnnnnnnnnnnnnnnnnnnnnnnnnnnnnnnnnnnnnnnnnnnnnnnnnnnnnnnnnnnnnnnnnnnnnnnnnnnnnnnnnnnnnnnnnnnnnnnnnnnnnnnnnnnnnnnnnnnnnnnnnnnnnnnnnnnnnnnnnnnnnnnnnnnnnnnnnnnnnnnnnnnnnnnnnnnnnnnnnnnnnnnnnnnnnnnnnnnnnnnnnnnnnnnnnnnnnnnnnnnnnnnnnnnnnnnnnnnnnnnnnnnnnnnnnnnnnnnnnnnnnnnnnnnnnnnnnnnnnnnnnnnnnnnnnnnnnnnnnnnnnnnnnnnnnnnnnnnnnnnnnnnnnnnnnnnnnnnnnnnnnnnnnnnnnnnnnnnnnnnnnnnnnnnnnnnnnnnnnnnnnnnnnnnnnnnnnnnnnnnnnnnnnnnnnnnnnnnnnnnnnnnnnnnnnnnnnnnnnnnnnnnnnnnnnnnnnnnnnnnnnnnnnnnnnnnnnnnnnnnnnnnnnnnnnnnnnnnnnnnnnnnnnnnnnnnnnnnnnnnnnnnnnnnnnnnnnnnnnnnnnnnnnnnnnnnnnnnnnnnnnnnnnnnnnnnnnnnnnnnnnnnnnnnnnnnnnnnnnnnnnnnnnnnnnnnnnnnnnnnnnnnnnnnnnnnnnnnnnnnnnnnnnnnnnnnnnnnnnnnnnnnnnnnnnnnnnnnnnnnnnnnnnnnnnnnnnnnnnnnnnnnnnnnnnnnnnnnnnnnnnnnnnnnnnnnnnnnnnnnnnnnnnnnnnnnnnnnnnnnnnnnnnnnnnnnnnnnnnnnnnnnnnnnnnnnnnnnnnnnnnnnnnnnnnnnnnnnnnnnnnnnnnnnnnnnnnnnnnnnnnnnnnnnnnnnnnnnnnnnnnnnnnnnnnnnnnnnnnnnnnnnnnnnnnnnnnnnnnnnnnnnnnnnnnnnnnnnnnnnnnnnnnnnnnnnnnnnnnnnnnnnnnnnnnnnnnnnnnnnnnnnnnnnnnnnnnnnnnnnnnnnnnnnnnnnnnnnnnnnnnnnnnnnnnnnnnnnnnnnnnnnnnnnnnnnnnnnnnnnnnnnnnnnnnnnnnnnnnnnnnnnnnnnnnnnnnnnnnnnnnnnnnnnnnnnnnnnnnnnnnnnnnnnnnnnnnnnnnnnnnnnnnnnnnnnnnnnnnnnnnnnnnnnnnnnnnnnnnnnnnnnnnnnnnnnnnnnnnnnnnnnnnnnnnnnnnnnnnnnnnnnnnnnnnnnnnnnnnnnnnnnnnnnnnnnnnnnnnnnnnnnnnnnnnnnnnnnnnnnnnnnnnnnnnnnnnnnnnnnnnnnnnnnnnnnnnnnnnnnnnnnnnnnnnnnnnnnnnnnnnnnnnnnnnnnnnnnnnnnnnnnnnnnnnnnnnnnnnnnnnnnnnnnnnnnnnnnnnnnnnnnnnnnnnnnnnnnnnnnnnnnnnnnnnnnnnnnnnnnnnnnnnnnnnnnnnnnnnnnnnnnnnnnnnnnnnnnnnnnnnnnnnnnnnnnnnnnnnnnnnnnnnnnnnnnnnnnnnnnnnnnnnnnnnnnnnnnnnnnnnnnnnnnnnnnnnnnnnnnnnnnnnnnnnnnnnnnnnnnnnnnnnnnnnnnnnnnnnnnnnnnnnnnnnnnnnnnnnnnnnnnnnnnnnnnnnnnnnnnnnnnnnnnnnnnnnnnnnnnnnnnnnnnnnnnnnnnnnnnnnnnnnnnnnnnnnnnnnnnnnnnnnnnnnnnnnnnnnnnnnnnnnnnnnnnnnnnnnnnnnnnnnnnnnnnnnnnnnnnnnnnnnnnnnnnnnnnnnnnnnnnnnnnnnnnnnnnnnnnnnnnnnnnnnnnnnnnnnnnnnnnnnnnnnnnnnnnnnnnnnnnnnnnnnnnnnnnnnnnnnnnnnnnnnnnnnnnnnnnnnnnnnnnnnnnnnnnnnnnnnnnnnnnnnnnnnnnnnnnnnnnnnnnnnnnnnnnnnnnnnnnnnnnnnnnnnnnnnnnnnnnnnnnnnnnnnnnnnnnnnnnnnnnnnnnnnnnnnnnnnnnnnnnnnnnnnnnnnnnnnnnnnnnnnnnnnnnnnnnnnnnnnnnnnnnnnnnnnnnnnnnnnnnnnnnnnnnnnnnnnnnnnnnnnnnnnnnnnnnnnnnnnnnnnnnnnnnnnnnnnnnnnnnnnnnnnnnnnnnnnnnnnnnnnnnnnnnnnnnnnnnnnnnnnnnnnnnnnnnnnnnnnnnnnnnnnnnnnnnnnnnnnnnnnnnnnnnnnnnnnnnnnnnnnnnnnnnnnnnnnnnnnnnnnnnnnnnnnnnnnnnnnnnnnnnnnnnnnnnnnnnnnnnnnnnnnnnnnnnnnnnnnnnnnnnnnnnnnnnnnnnnnnnnnnnnnnnnnnnnnnnnnnnnnnnnnnnnnnnnnnnnnnnnnnnnnnnnnnnnnnnnnnnnnnnnnnnnnnnnnnnnnnnnnnnnnnnnnnnnnnnnnnnnnnnnnnnnnnnnnnnnnnnnnnnnnnnnnnnnnnnnnnnnnnnnnnnnnnnnnnnnnnnnnnnnnnnnnnnnnnnnnnnnnnnnnnnnnnnnnnnnnnnnnnnnnnnnnnnnnnnnnnnnnnnnnnnnnnnnnnnnnnnnnnnnnnnnnnnnnnnnnnnnnnnnnnnnnnnnnnnnnnnnnnnnnnnnnnnnnnnnnnnnnnnnnnnnnnnnnnnnnnnnnnnnnnnnnnnnnnnnnnnnnnnnnnnnnnnnnnnnnnnnnnnnnnnnnnnnnnnnnnnnnnnnnnnnnnnnnnnnnnnnnnnnnnnnnnnnnnnnnnnnnnnnnnnnnnnnnnnnnnnnnnnnnnnnnnnnnnnnnnnnnnnnnnnnnnnnnnnnnnnnnnnnnnnnnnnnnnnnnnnnnnnnnnnnnnnnnnnnnnnnnnnnnnnnnnnnnnnnnnnnnnnnnnnnnnnnnnnnnnnnnnnnnnnnnnnnnnnnnnnnnnnnnnnnnnnnnnnnnnnnnnnnnnnnnnnnnnnnnnnnnnnnnnnnnnnnnnnnnnnnnnnnnnnnnnnnnnnnnnnnnnnnnnnnnnnnnnnnnnnnnnnnnnnnnnnnnnnnnnnnnnnnnnnnnnnnnnnnnnnnnnnnnnnnnnnnnnnnnnnnnnnnnnnnnnnnnnnnnnnnnnnnnnnnnnnnnnnnnnnnnnnnnnnnnnnnnnnnnnnnnnnnnnnnnnnnnnnnnnnnnnnnnnnnnnnnnnnnnnnnnnnnnnnnnnnnnnnnnnnnnnnnnnnnnnnnnnnnnnnnnnnnnnnnnnnnnnnnnnnnnnnnnnnnnnnnnnnnnnnnnnnnnnnnnnnnnnnnnnnnnnnnnnnnnnnnnnnnnnnnnnnnnnnnnnnnnnnnnnnnnnnnnnnnnnnnnnnnnnnnnnnnnnnnnnnnnnnnnnnnnnnnnnnnnnnnnnnnnnnnnnnnnnnnnnnnnnnnnnnnnnnnnnnnnnnnnnnnnnnnnnnnnnnnnnnnnnnnnnnnnnnnnnnnnnnnnnnnnnnnnnnnnnnnnnnnnnnnnnnnnnnnnnnnnnnnnnnnnnnnnnnnnnnnnnnnnnnnnnnnnnnnnnnnnnnnnnnnnnnnnnnnnnnnnnnnnnnnnnnnnnnnnnnnnnnnnnnnnnnnnnnnnnnnnnnnnnnnnnnnnnnnnnnnnnnnnnnnnnnnnnnnnnnnnnnnnnnnnnnnnnnnnnnnnnnnnnnnnnnnnnnnnnnnnnnnnnnnnnnnnnnnnnnnnnnnnnnnnnnnnnnnnnnnnnnnnnnnnnnnnnnnnnnnnnnnnnnnnnnnnnnnnnnnnnnnnnnnnnnnnnnnnnnnnnnnnnnnnnnnnnnnnnnnnnnnnnnnnnnnnnnnnnnnnnnnnnnnnnnnnnnnnnnnnnnnnnnnnnnnnnnnnnnnnnnnnnnnnnnnnnnnnnnnnnnnnnnnnnnnnnnnnnnnnnnnnnnnnnnnnnnnnnnnnnnnnnnnnnnnnnnnnnnnnnnnnnnnnnnnnnnnnnnnnnnnnnnnnnnnnnnnnnnnnnnnnnnnnnnnnnnnnnnnnnnnnnnnnnnnnnnnnnnnnnnnnnnnnnnnnnnnnnnnnnnnnnnnnnnnnnnnnnnnnnnnnnnnnnnnnnnnnnnnnnnnnnnnnnnnnnnnnnnnnnnnnnnnnnnnnnnnnnnnnnnnnnnnnnnnnnnnnnnnnnnnnnnnnnnnnnnnnnnnnnnnnnnnnnnnnnnnnnnnnnnnnnnnnnnnnnnnnnnnnnnnnnnnnnnnnnnnnnnnnnnnnnnnnnnnnnnnnnnnnnnnnnnnnnnnnnnnnnnnnnnnnnnnnnnnnnnnnnnnnnnnnnnnnnnnnnnnnnnnnnnnnnnnnnnnnnnnnnnnnnnnnnnnnnnnnnnnnnnnnnnnnnnnnnnnnnnnnnnnnnnnnnnnnnnnnnnnnnnnnnnnnnnnnnnnnnnnnnnnnnnnnnnnnnnnnnnnnnnnnnnnnnnnnnnnnnnnnnnnnnnnnnnnnnnnnnnnnnnnnnnnnnnnnnnnnnnnnnnnnnnnnnnnnnnnnnnnnnnnnnnnnnnnnnnnnnnnnnnnnnnnnnnnnnnnnnnnnnnnnnnnnnnnnnnnnnnnnnnnnnnnnnnnnnnnnnnnnnnnnnnnnnnnnnnnnnnnnnnnnnnnnnnnnnnnnnnnnnnnnnnnnnnnnnnnnnnnnnnnnnnnnnnnnnnnnnnnnnnnnnnnnnnnnnnnnnnnnnnnnnnnnnnnnnnnnnnnnnnnnnnnnnnnnnnnnnnnnnnnnnnnnnnnnnnnnnnnnnnnnnnnnnnnnnnnnnnnnnnnnnnnnnnnnnnnnnnnnnnnnnnnnnnnnnnnnnnnnnnnnnnnnnnnnnnnnnnnnnnnnnnnnnnnnnnnnnnnnnnnnnnnnnnnnnnnnnnnnnnnnnnnnnnnnnnnnnnnnnnnnnnnnnnnnnnnnnnnnnnnnnnnnnnnnnnnnnnnnnnnnnnnnnnnnnnnnnnnnnnnnnnnnnnnnnnnnnnnnnnnnnnnnnnnnnnnnnnnnnnnnnnnnnnnnnnnnnnnnnnnnnnnnnnnnnnnnnnnnnnnnnnnnnnnnnnnnnnnnnnnnnnnnnnnnnnnnnnnnnnnnnnnnnnnnnnnnnnnnnnnnnnnnnnnnnnnnnnnnnnnnnnnnnnnnnnnnnnnnnnnnnnnnnnnnnnnnnnnnnnnnnnnnnnnnnnnnnnnnnnnnnnnnnnnnnnnnnnnnnnnnnnnnnnnnnnnnnnnnnnnnnnnnnnnnnnnnnnnnnnnnnnnnnnnnnnnnnnnnnnnnnnnnnnnnnnnnnnnnnnnnnnnnnnnnnnnnnnnnnnnnnnnnnnnnnnnnnnnnnnnnnnnnnnnnnnnnnnnnnnnnnnnnnnnnnnnnnnnnnnnnnnnnnnnnnnnnnnnnnnnnnnnnnnnnnnnnnnnnnnnnnnnnnnnnnnnnnnnnnnnnnnnnnnnnnnnnnnnnnnnnnnnnnnnnnnnnnnnnnnnnnnnnnnnnnnnnnnnnnnnnnnnnnnnnnnnnnnnnnnnnnnnnnnnnnnnnnnnnnnnnnnnnnnnnnnnnnnnnnnnnnnnnnnnnnnnnnnnnnnnnnnnnnnnnnnnnnnnnnnnnnnnnnnnnnnnnnnnnnnnnnnnnnnnnnnnnnnnnnnnnnnnnnnnnnnnnnnnnnnnnnnnnnnnnnnnnnnnnnnnnnnnnnnnnnnnnnnnnnnnnnnnnnnnnnnnnnnnnnnnnnnnnnnnnnnnnnnnnnnnnnnnnnnnnnnnnnnnnnnnnnnnnnnnnnnnnnnnnnnnnnnnnnnnnnnnnnnnnnnnnnnnnnnnnnnnnnnnnnnnnnnnnnnnnnnnnnnnnnnnnnnnnnnnnnnnnnnnnnnnnnnnnnnnnnnnnnnnnnnnnnnnnnnnnnnnnnnnnnnnnnnnnnnnnnnnnnnnnnnnnnnnnnnnnnnnnnnnnnnnnnnnnnnnnnnnnnnnnnnnnnnnnnnnnnnnnnnnnnnnnnnnnnnnnnnnnnnnnnnnnnnnnnnnnnnnnnnnnnnnnnnnnnnnnnnnnnnnnnnnnnnnnnnnnnnnnnnnnnnnnnnnnnnnnnnnnnnnnnnnnnnnnnnnnnnnnnnnnnnnnnnnnnnnnnnnnnnnnnnnnnnnnnnnnnnnnnnnnnnnnnnnnnnnnnnnnnnnnnnnnnnnnnnnnnnnnnnnnnnnnnnnnnnnnnnnnnnnnnnnnnnnnnnnnnnnnnnnnnnnnnnnnnnnnnnnnnnnnnnnnnnnnnnnnnnnnnnnnnnnnnnnnnnnnnnnnnnnnnnnnnnnnnnnnnnnnnnnnnnnnnnnnnnnnnnnnnnnnnnnnnnnnnnnnnnnnnnnnnnnnnnnnnnnnnnnnnnnnnnnnnnnnnnnnnnnnnnnnnnnnnnnnnnnnnnnnnnnnnnnnnnnnnnnnnnnnnnnnnnnnnnnnnnnnnnnnnnnnnnnnnnnnnnnnnnnnnnnnnnnnnnnnnnnnnnnnnnnnnnnnnnnnnnnnnnnnnnnnnnnnnnnnnnnnnnnnnnnnnnnnnnnnnnnnnnnnnnnnnnnnnnnnnnnnnnnnnnnnnnnnnnnnnnnnnnnnnnnnnnnnnnnnnnnnnnnnnnnnnnnnnnnnnnnnnnnnnnnnnnnnnnnnnnnnnnnnnnnnnnnnnnnnnnnnnnnnnnnnnnnnnnnnnnnnnnnnnnnnnnnnnnnnnnnnnnnnnnnnnnnnnnnnnnnnnnnnnnnnnnnnnnnnnnnnnnnnnnnnnnnnnnnnnnnnnnnnnnnnnnnnnnnnnnnnnnnnnnnnnnnnnnnnnnnnnnnnnnnnnnnnnnnnnnnnnnnnnnnnnnnnnnnnnnnnnnnnnnnnnnnnnnnnnnnnnnnnnnnnnnnnnnnnnnnnnnnnnnnnnnnnnnnnnnnnnnnnnnnnnnnnnnnnnnnnnnnnnnnnnnnnnnnnnnnnnnnnnnnnnnnnnnnnnnnnnnnnnnnnnnnnnnnnnnnnnnnnnnnnnnnnnnnnnnnnnnnnnnnnnnnnnnnnnnnnnnnnnnnnnnnnnnnnnnnnnnnnnnnnnnnnnnnnnnnnnnnnnnnnnnnnnnnnnnnnnnnnnnnnnnnnnnnnnnnnnnnnnnnnnnnnnnnnnnnnnnnnnnnnnnnnnnnnnnnnnnnnnnnnnnnnnnnnnnnnnnnnnnnnnnnnnnnnnnnnnnnnnnnnnnnnnnnnnnnnnnnnnnnnnnnnnnnnnnnnnnnnnnnnnnnnnnnnnnnnnnnnnnnnnnnnnnnnnnnnnnnnnnnnnnnnnnnnnnnnnnnnnnnnnnnnnnnnnnnnnnnnnnnnnnnnnnnnnnnnnnnnnnnnnnnnnnnnnnnnnnnnnnnnnnnnnnnnnnnnnnnnnnnnnnnnnnnnnnnnnnnnnnnnnnnnnnnnnnnnnnnnnnnnnnnnnnnnnnnnnnnnnnnnnnnnnnnnnnnnnnnnnnnnnnnnnnnnnnnnnnnnnnnnnnnnnnnnnnnnnnnnnnnnnnnnnnnnnnnnnnnnnnnnnnnnnnnnnnnnnnnnnnnnnnnnnnnnnnnnnnnnnnnnnnnnnnnnnnnnnnnnnnnnnnnnnnnnnnnnnnnnnnnnnnnnnnnnnnnnnnnnnnnnnnnnnnnnnnnnnnnnnnnnnnnnnnnnnnnnnnnnnnnnnnnnnnnnnnnnnnnnnnnnnnnnnnnnnnnnnnnnnnnnnnnnnnnnnnnnnnnnnnnnnnnnnnnnnnnnnnnnnnnnnnnnnnnnnnnnnnnnnnnnnnnnnnnnnnnnnnnnnnnnnnnnnnnnnnnnnnnnnnnnnnnnnnnnnnnnnnnnnnnnnnnnnnnnnnnnnnnnnnnnnnnnnnnnnnnnnnnnnnnnnnnnnnnnnnnnnnnnnnnnnnnnnnnnnnnnnnnnnnnnnnnnnnnnnnnnnnnnnnnnnnnnnnnnnnnnnnnnnnnnnnnnnnnnnnnnnnnnnnnnnnnnnnnnnnnnnnnnnnnnnnnnnnnnnnnnnnnnnnnnnnnnnnnnnnnnnnnnnnnnnnnnnnnnnnnnnnnnnnnnnnnnnnnnnnnnnnnnnnnnnnnnnnnnnnnnnnnnnnnnnnnnnnnnnnnnnnnnnnnnnnnnnnnnnnnnnnnnnnnnnnnnnnnnnnnnnnnnnnnnnnnnnnnnnnnnnnnnnnnnnnnnnnnnnnnnnnnnnnnnnnnnnnnnnnnnnnnnnnnnnnnnnnnnnnnnnnnnnnnnnnnnnnnnnnnnnnnnnnnnnnnnnnnnnnnnnnnnnnnnnnnnnnnnnnnnnnnnnnnnnnnnnnnnnnnnnnnnnnnnnnnnnnnnnnnnnnnnnnnnnnnnnnnnnnnnnnnnnnnnnnnnnnnnnnnnnnnnnnnnnnnnnnnnnnnnnnnnnnnnnnnnnnnnnnnnnnnnnnnnnnnnnnnnnnnnnnnnnnnnnnnnnnnnnnnnnnnnnnnnnnnnnnnnnnnnnnnnnnnnnnnnnnnnnnnnnnnnnnnnnnnnnnnnnnnnnnnnnnnnnnnnnnnnnnnnnnnnnnnnnnnnnnnnnnnnnnnnnnnnnnnnnnnnnnnnnnnnnnnnnnnnnnnnnnnnnnnnnnnnnnnnnnnnnnnnnnnnnnnnnnnnnnnnnnnnnnnnnnnnnnnnnnnnnnnnnnnnnnnnnnnnnnnnnnnnnnnnnnnnnnnnnnnnnnnnnnnnnnnnnnnnnnnnnnnnnnnnnnnnnnnnnnnnnnnnnnnnnnnnnnnnnnnnnnnnnnnnnnnnnnnnnnnnnnnnnnnnnnnnnnnnnnnnnnnnnnnnnnnnnnnnnnnnnnnnnnnnnnnnnnnnnnnnnnnnnnnnnnnnnnnnnnnnnnnnnnnnnnnnnnnnnnnnnnnnnnnnnnnnnnnnnnnnnnnnnnnnnnnnnnnnnnnnnnnnnnnnnnnnnnnnnnnnnnnnnnnnnnnnnnnnnnnnnnnnnnnnnnnnnnnnnnnnnnnnnnnnnnnnnnnnnnnnnnnnnnnnnnnnnnnnnnnnnnnnnnnnnnnnnnnnnnnnnnnnnnnnnnnnnnnnnnnnnnnnnnnnnnnnnnnnnnnnnnnnnnnnnnnnnnnnnnnnnnnnnnnnnnnnnnnnnnnnnnnnnnnnnnnnnnnnnnnnnnnnnnnnnnnnnnnnnnnnnnnnnnnnnnnnnnnnnnnnnnnnnnnnnnnnnnnnnnnnnnnnnnnnnnnnnnnnnnnnnnnnnnnnnnnnnnnnnnnnnnnnnnnnnnnnnnnnnnnnnnnnnnnnnnnnnnnnnnnnnnnnnnnnnnnnnnnnnnnnnnnnnnnnnnnnnnnnnnnnnnnnnnnnnnnnnnnnnnnnnnnnnnnnnnnnnnnnnnnnnnnnnnnnnnnnnnnnnnnnnnnnnnnnnnnnnnnnnnnnnnnnnnnnnnnnnnnnnnnnnnnnnnnnnnnnnnnnnnnnnnnnnnnnnnnnnnnnnnnnnnnnnnnnnnnnnnnnnnnnnnnnnnnnnnnnnnnnnnnnnnnnnnnnnnnnnnnnnnnnnnnnnnnnnnnnnnnnnnnnnnnnnnnnnnnnnnnnnnnnnnnnnnnnnnnnnnnnnnnnnnnnnnnnnnnnnnnnnnnnnnnnnnnnnnnnnnnnnnnnnnnnnnnnnnnnnnnnnnnnnnnnnnnnnnnnnnnnnnnnnnnnnnnnnnnnnnnnnnnnnnnnnnnnnnnnnnnnnnnnnnnnnnnnnnnnnnnnnnnnnnnnnnnnnnnnnnnnnnnnnnnnnnnnnnnnnnnnnnnnnnnnnnnnnnnnnnnnnnnnnnnnnnnnnnnnnnnnnnnnnnnnnnnnnnnnnnnnnnnnnnnnnnnnnnnnnnnnnnnnnnnnnnnnnnnnnnnnnnnnnnnnnnnnnnnnnnnnnnnnnnnnnnnnnnnnnnnnnnnnnnnnnnnnnnnnnnnnnnnnnnnnnnnnnnnnnnnnnnnnnnnnnnnnnnnnnnnnnnnnnnnnnnnnnnnnnnnnnnnnnnnnnnnnnnnnnnnnnnnnnnnnnnnnnnnnnnnnnnnnnnnnnnnnnnnnnnnnnnnnnnnnnnnnnnnnnnnnnnnnnnnnnnnnnnnnnnnnnnnnnnnnnnnnnnnnnnnnnnnnnnnnnnnnnnnnnnnnnnnnnnnnnnnnnnnnnnnnnnnnnnnnnnnnnnnnnnnnnnnnnnnnnnnnnnnnnnnnnnnnnnnnnnnnnnnnnnnnnnnnnnnnnnnnnnnnnnnnnnnnnnnnnnnnnnnnnnnnnnnnnnnnnnnnnnnnnnnnnnnnnnnnnnnnnnnnnnnnnnnnnnnnnnnnnnnnnnnnnnnnnnnnnnnnnnnnnnnnnnnnnnnnnnnnnnnnnnnnnnnnnnnnnnnnnnnnnnnnnnnnnnnnnnnnnnnnnnnnnnnnnnnnnnnnnnnnnnnnnnnnnnnnnnnnnnnnnnnnnnnnnnnnnnnnnnnnnnnnnnnnnnnnnnnnnnnnnnnnnnnnnnnnnnnnnnnnnnnnnnnnnnnnnnnnnnnnnnnnnnnnnnnnnnnnnnnnnnnnnnnnnnnnnnnnnnnnnnnnnnnnnnnnnnnnnnnnnnnnnnnnnnnnnnnnnnnnnnnnnnnnnnnnnnnnnnnnnnnnnnnnnnnnnnnnnnnnnnnnnnnnnnnnnnnnnnnnnnnnnnnnnnnnnnnnnnnnnnnnnnnnnnnnnnnnnnnnnnnnnnnnnnnnnnnnnnnnnnnnnnnnnnnnnnnnnnnnnnnnnnnnnnnnnnnnnnnnnnnnnnnnnnnnnnnnnnnnnnnnnnnnnnnnnnnnnnnnnnnnnnnnnnnnnnnnnnnnnnnnnnnnnnnnnnnnnnnnnnnnnnnnnnnnnnnnnnnnnnnnnnnnnnnnnnnnnnnnnnnnnnnnnnnnnnnnnnnnnnnnnnnnnnnnnnnnnnnnnnnnnnnnnnnnnnnnnnnnnnnnnnnnnnnnnnnnnnnnnnnnnnnnnnnnnnnnnnnnnnnnnnnnnnnnnnnnnnnnnnnnnnnnnnnnnnnnnnnnnnnnnnnnnnnnnnnnnnnnnnnnnnnnnnnnnnnnnnnnnnnnnnnnnnnnnnnnnnnnnnnnnnnnnnnnnnnnnnnnnnnnnnnnnnnnnnnnnnnnnnnnnnnnnnnnnnnnnnnnnnnnnnnnnnnnnnnnnnnnnnnnnnnnnnnnnnnnnnnnnnnnnnnnnnnnnnnnnnnnnnnnnnnnnnnnnnnnnnnnnnnnnnnnnnnnnnnnnnnnnnnnnnnnnnnnnnnnnnnnnnnnnnnnnnnnnnnnnnnnnnnnnnnnnnnnnnnnnnnnnnnnnnnnnnnnnnnnnnnnnnnnnnnnnnnnnnnnnnnnnnnnnnnnnnnnnnnnnnnnnnnnnnnnnnnnnnnnnnnnnnnnnnnnnnnnnnnnnnnnnnnnnnnnnnnnnnnnnnnnnnnnnnnnnnnnnnnnnnnnnnnnnnnnnnnnnnnnnnnnnnnnnnnnnnnnnnnnnnnnnnnnnnnnnnnnnnnnnnnnnnnnnnnnnnnnnnnnnnnnnnnnnnnnnnnnnnnnnnnnnnnnnnnnnnnnnnnnnnnnnnnnnnnnnnnnnnnnnnnnnnnnnnnnnnnnnnnnnnnnnnnnnnnnnnnnnnnnnnnnnnnnnnnnnnnnnnnnnnnnnnnnnnnnnnnnnnnnnnnnnnnnnnnnnnnnnnnnnnnnnnnnnnnnnnnnnnnnnnnnnnnnnnnnnnnnnnnnnnnnnnnnnnnnnnnnnnnnnnnnnnnnnnnnnnnnnnnnnnnnnnnnnnnnnnnnnnnnnnnnnnnnnnnnnnnnnnnnnnnnnnnnnnnnnnnnnnnnnnnnnnnnnnnnnnnnnnnnnnnnnnnnnnnnnnnnnnnnnnnnnnnnnnnnnnnnnnnnnnnnnnnnnnnnnnnnnnnnnnnnnnnnnnnnnnnnnnnnnnnnnnnnnnnnnnnnnnnnnnnnnnnnnnnnnnnnnnnnnnnnnnnnnnnnnnnnnnnnnnnnnnnnnnnnnnnnnnnnnnnnnnnnnnnnnnnnnnnnnnnnnnnnnnnnnnnnnnnnnnnnnnnnnnnnnnnnnnnnnnnnnnnnnnnnnnnnnnnnnnnnnnnnnnnnnnnnnnnnnnnnnnnnnnnnnnnnnnnnnnnnnnnnnnnnnnnnnnnnnnnnnnnnnnnnnnnnnnnnnnnnnnnnnnnnnnnnnnnnnnnnnnnnnnnnnnnnnnnnnnnnnnnnnnnnnnnnnnnnnnnnnnnnnnnnnnnnnnnnnnnnnnnnnnnnnnnnnnnnnnnnnnnnnnnnnnnnnnnnnnnnnnnnnnnnnnnnnnnnnnnnnnnnnnnnnnnnnnnnnnnnnnnnnnnnnnnnnnnnnnnnnnnnnnnnnnnnnnnnnnnnnnnnnnnnnnnnnnnnnnnnnnnnnnnnnnnnnnnnnnnnnnnnnnnnnnnnnnnnnnnnnnnnnnnnnnnnnnnnnnnnnnnnnnnnnnnnnnnnnnnnnnnnnnnnnnnnnnnnnnnnnnnnnnnnnnnnnnnnnnnnnnnnnnnnnnnnnnnnnnnnnnnnnnnnnnnnnnnnnnnnnnnnnnnnnnnnnnnnnnnnnnnnnnnnnnnnnnnnnnnnnnnnnnnnnnnnnnnnnnnnnnnnnnnnnnnnnnnnnnnnnnnnnnnnnnnnnnnnnnnnnnnnnnnnnnnnnnnnnnnnnnnnnnnnnnnnnnnnnnnnnnnnnnnnnnnnnnnnnnnnnnnnnnnnnnnnnnnnnnnnnnnnnnnnnnnnnnnnnnnnnnnnnnnnnnnnnnnnnnnnnnnnnnnnnnnnnnnnnnnnnnnnnnnnnnnnnnnnnnnnnnnnnnnnnnnnnnnnnnnnnnnnnnnnnnnnnnnnnnnnnnnnnnnnnnnnnnnnnnnnnnnnnnnnnnnnnnnnnnnnnnnnnnnnnnnnnnnnnnnnnnnnnnnnnnnnnnnnnnnnnnnnnnnnnnnnnnnnnnnnnnnnnnnnnnnnnnnnnnnnnnnnnnnnnnnnnnnnnnnnnnnnnnnnnnnnnnnnnnnnnnnnnnnnnnnnnnnnnnnnnnnnnnnnnnnnnnnnnnnnnnnnnnnnnnnnnnnnnnnnnnnnnnnnnnnnnnnnnnnnnnnnnnnnnnnnnnnnnnnnnnnnnnnnnnnnnnnnnnnnnnnnnnnnnnnnnnnnnnnnnnnnnnnnnnnnnnnnnnnnnnnnnnnnnnnnnnnnnnnnnnnnnnnnnnnnnnnnnnnnnnnnnnnnnnnnnnnnnnnnnnnnnnnnnnnnnnnnnnnnnnnnnnnnnnnnnnnnnnnnnnnnnnnnnnnnnnnnnnnnnnnnnnnnnnnnnnnnnnnnnnnnnnnnnnnnnnnnnnnnnnnnnnnnnnnnnnnnnnnnnnnnnnnnnnnnnnnnnnnnnnnnnnnnnnnnnnnnnnnnnnnnnnnnnnnnnnnnnnnnnnnnnnnnnnnnnnnnnnnnnnnnnnnnnnnnnnnnnnnnnnnnnnnnnnnnnnnnnnnnnnnnnnnnnnnnnnnnnnnnnnnnnnnnnnnnnnnnnnnnnnnnnnnnnnnnnnnnnnnnnnnnnnnnnnnnnnnnnnnnnnnnnnnnnnnnnnnnnnnnnnnnnnnnnnnnnnnnnnnnnnnnnnnnnnnnnnnnnnnnnnnnnnnnnnnnnnnnnnnnnnnnnnnnnnnnnnnnnnnnnnnnnnnnnnnnnnnnnnnnnnnnnnnnnnnnnnnnnnnnnnnnnnnnnnnnnnnnnnnnnnnnnnnnnnnnnnnnnnnnnnnnnnnnnnnnnnnnnnnnnnnnnnnnnnnnnnnnnnnnnnnnnnnnnnnnnnnnnnnnnnnnnnnnnnnnnnnnnnnnnnnnnnnnnnnnnnnnnnnnnnnnnnnnnnnnnnnnnnnnnnnnnnnnnnnnnnnnnnnnnnnnnnnnnnnnnnnnnnnnnnnnnnnnnnnnnnnnnnnnnnnnnnnnnnnnnnnnnnnnnnnnnnnnnnnnnnnnnnnnnnnnnnnnnnnnnnnnnnnnnnnnnnnnnnnnnnnnnnnnnnnnnnnnnnnnnnnnnnnnnnnnnnnnnnnnnnnnnnnnnnnnnnnnnnnnnnnnnnnnnnnnnnnnnnnnnnnnnnnnnnnnnnnnnnnnnnnnnnnnnnnnnnnnnnnnnnnnnnnnnnnnnnnnnnnnnnnnnnnnnnnnnnnnnnnnnnnnnnnnnnnnnnnnnnnnnnnnnnnnnnnnnnnnnnnnnnnnnnnnnnnnnnnnnnnnnnnnnnnnnnnnnnnnnnnnnnnnnnnnnnnnnnnnnnnnnnnnnnnnnnnnnnnnnnnnnnnnnnnnnnnnnnnnnnnnnnnnnnnnnnnnnnnnnnnnnnnnnnnnnnnnnnnnnnnnnnnnnnnnnnnnnnnnnnnnnnnnnnnnnnnnnnnnnnnnnnnnnnnnnnnnnnnnnnnnnnnnnnnnnnnnnnnnnnnnnnnnnnnnnnnnnnnnnnnnnnnnnnnnnnnnnnnnnnnnnnnnnnnnnnnnnnnnnnnnnnnnnnnnnnnnnnnnnnnnnnnnnnnnnnnnnnnnnnnnnnnnnnnnnnnnnnnnnnnnnnnnnnnnnnnnnnnnnnnnnnnnnnnnnnnnnnnnnnnnnnnnnnnnnnnnnnnnnnnnnnnnnnnnnnnnnnnnnnnnnnnnnnnnnnnnnnnnnnnnnnnnnnnnnnnnnnnnnnnnnnnnnnnnnnnnnnnnnnnnnnnnnnnnnnnnnnnnnnnnnnnnnnnnnnnnnnnnnnnnnnnnnnnnnnnnnnnnnnnnnnnnnnnnnnnnnnnnnnnnnnnnnnnnnnnnnnnnnnnnnnnnnnnnnnnnnnnnnnnnnnnnnnnnnnnnnnnnnnnnnnnnnnnnnnnnnnnnnnnnnnnnnnnnnnnnnnnnnnnnnnnnnnnnnnnnnnnnnnnnnnnnnnnnnnnnnnnnnnnnnnnnnnnnnnnnnnnnnnnnnnnnnnnnnnnnnnnnnnnnnnnnnnnnnnnnnnnnnnnnnnnnnnnnnnnnnnnnnnnnnnnnnnnnnnnnnnnnnnnnnnnnnnnnnnnnnnnnnnnnnnnnnnnnnnnnnnnnnnnnnnnnnnnnnnnnnnnnnnnnnnnnnnnnnnnnnnnnnnnnnnnnnnnnnnnnnnnnnnnnnnnnnnnnnnnnnnnnnnnnnnnnnnnnnnnnnnnnnnnnnnnnnnnnnnnnnnnnnnnnnnnnnnnnnnnnnnnnnnnnnnnnnnnnnnnnnnnnnnnnnnnnnnnnnnnnnnnnnnnnnnnnnnnnnnnnnnnnnnnnnnnnnnnnnnnnnnnnnnnnnnnnnnnnnnnnnnnnnnnnnnnnnnnnnnnnnnnnnnnnnnnnnnnnnnnnnnnnnnnnnnnnnnnnnnnnnnnnnnnnnnnnnnnnnnnnnnnnnnnnnnnnnnnnnnnnnnnnnnnnnnnnnnnnnnnnnnnnnnnnnnnnnnnnnnnnnnnnnnnnnnnnnnnnnnnnnnnnnnnnnnnnnnnnnnnnnnnnnnnnnnnnnnnnnnnnnnnnnnnnnnnnnnnnnnnnnnnnnnnnnnnnnnnnnnnnnnnnnnnnnnnnnnnnnnnnnnnnnnnnnnnnnnnnnnnnnnnnnnnnnnnnnnnnnnnnnnnnnnnnnnnnnnnnnnnnnnnnnnnnnnnnnnnnnnnnnnnnnnnnnnnnnnnnnnnnnnnnnnnnnnnnnnnnnnnnnnnnnnnnnnnnnnnnnnnnnnnnnnnnnnnnnnnnnnnnnnnnnnnnnnnnnnnnnnnnnnnnnnnnnnnnnnnnnnnnnnnnnnnnnnnnnnnnnnnnnnnnnnnnnnnnnnnnnnnnnnnnnnnnnnnnnnnnnnnnnnnnnnnnnnnnnnnnnnnnnnnnnnnnnnnnnnnnnnnnnnnnnnnnnnnnnnnnnnnnnnnnnnnnnnnnnnnnnnnnnnnnnnnnnnnnnnnnnnnnnnnnnnnnnnnnnnnnnnnnnnnnnnnnnnnnnnnnnnnnnnnnnnnnnnnnnnnnnnnnnnnnnnnnnnnnnnnnnnnnnnnnnnnnnnnnnnnnnnnnnnnnnnnnnnnnnnnnnnnnnnnnnnnnnnnnnnnnnnnnnnnnnnnnnnnnnnnnnnnnnnnnnnnnnnnnnnnnnnnnnnnnnnnnnnnnnnnnnnnnnnnnnnnnnnnnnnnnnnnnnnnnnnnnnnnnnnnnnnnnnnnnnnnnnnnnnnnnnnnnnnnnnnnnnnnnnnnnnnnnnnnnnnnnnnnnnnnnnnnnnnnnnnnnnnnnnnnnnnnnnnnnnnnnnnnnnnnnnnnnnnnnnnnnnnnnnnnnnnnnnnnnnnnnnnnnnnnnnnnnnnnnnnnnnnnnnnnnnnnnnnnnnnnnnnnnnnnnnnnnnnnnnnnnnnnnnnnnnnnnnnnnnnnnnnnnnnnnnnnnnnnnnnnnnnnnnnnnnnnnnnnnnnnnnnnnnnnnnnnnnnnnnnnnnnnnnnnnnnnnnnnnnnnnnnnnnnnnnnnnnnnnnnnnnnnnnnnnnnnnnnnnnnnnnnnnnnnnnnnnnnnnnnnnnnnnnnnnnnnnnnnnnnnnnnnnnnnnnnnnnnnnnnnnnnnnnnnnnnnnnnnnnnnnnnnnnnnnnnnnnnnnnnnnnnnnnnnnnnnnnnnnnnnnnnnnnnnnnnnnnnnnnnnnnnnnnnnnnnnnnnnnnnnnnnnnnnnnnnnnnnnnnnnnnnnnnnnnnnnnnnnnnnnnnnnnnnnnnnnnnnnnnnnnnnnnnnnnnnnnnnnnnnnnnnnnnnnnnnnnnnnnnnnnnnnnnnnnnnnnnnnnnnnnnnnnnnnnnnnnnnnnnnnnnnnnnnnnnnnnnnnnnnnnnnnnnnnnnnnnnnnnnnnnnnnnnnnnnnnnnnnnnnnnnnnnnnnnnnnnnnnnnnnnnnnnnnnnnnnnnnnnnnnnnnnnnnnnnnnnnnnnnnnnnnnnnnnnnnnnnnnnnnnnnnnnnnnnnnnnnnnnnnnnnnnnnnnnnnnnnnnnnnnnnnnnnnnnnnnnnnnnnnnnnnnnnnnnnnnnnnnnnnnnnnnnnnnnnnnnnnnnnnnnnnnnnnnnnnnnnnnnnnnnnnnnnnnnnnnnnnnnnnnnnnnnnnnnnnnnnnnnnnnnnnnnnnnnnnnnnnnnnnnnnnnnnnnnnnnnnnnnnnnnnnnnnnnnnnnnnnnnnnnnnnnnnnnnnnnnnnnnnnnnnnnnnnnnnnnnnnnnnnnnnnnnnnnnnnnnnnnnnnnnnnnnnnnnnnnnnnnnnnnnnnnnnnnnnnnnnnnnnnnnnnnnnnnnnnnnnnnnnnnnnnnnnnnnnnnnnnnnnnnnnnnnnnnnnnnnnnnnnnnnnnnnnnnnnnnnnnnnnnnnnnnnnnnnnnnnnnnnnnnnnnnnnnnnnnnnnnnnnnnnnnnnnnnnnnnnnnnnnnnnnnnnnnnnnnnnnnnnnnnnnnnnnnnnnnnnnnnnnnnnnnnnnnnnnnnnnnnnnnnnnnnnnnnnnnnnnnnnnnnnnnnnnnnnnnnnnnnnnnnnnnnnnnnnnnnnnnnnnnnnnnnnnnnnnnnnnnnnnnnnnnnnnnnnnnnnnnnnnnnnnnnnnnnnnnnnnnnnnnnnnnnnnnnnnnnnnnnnnnnnnnnnnnnnnnnnnnnnnnnnnnnnnnnnnnnnnnnnnnnnnnnnnnnnnnnnnnnnnnnnnnnnnnnnnnnnnnnnnnnnnnnnnnnnnnnnnnnnnnnnnnnnnnnnnnnnnnnnnnnnnnnnnnnnnnnnnnnnnnnnnnnnnnnnnnnnnnnnnnnnnnnnnnnnnnnnnnnnnnnnnnnnnnnnnnnnnnnnnnnnnnnnnnnnnnnnnnnnnnnnnnnnnnnnnnnnnnnnnnnnnnnnnnnnnnnnnnnnnnnnnnnnnnnnnnnnnnnnnnnnnnnnnnnnnnnnnnnnnnnnnnnnnnnnnnnnnnnnnnnnnnnnnnnnnnnnnnnnnnnnnnnnnnnnnnnnnnnnnnnnnnnnnnnnnnnnnnnnnnnnnnnnnnnnnnnnnnnnnnnnnnnnnnnnnnnnnnnnnnnnnnnnnnnnnnnnnnnnnnnnnnnnnnnnnnnnnnnnnnnnnnnnnnnnnnnnnnnnnnnnnnnnnnnnnnnnnnnnnnnnnnnnnnnnnnnnnnnnnnnnnnnnnnnnnnnnnnnnnnnnnnnnnnnnnnnnnnnnnnnnnnnnnnnnnnnnnnnnnnnnnnnnnnnnnnnnnnnnnnnnnnnnnnnnnnnnnnnnnnnnnnnnnnnnnnnnnnnnnnnnnnnnnnnnnnnnnnnnnnnnnnnnnnnnnnnnnnnnnnnnnnnnnnnnnnnnnnnnnnnnnnnnnnnnnnnnnnnnnnnnnnnnnnnnnnnnnnnnnnnnnnnnnnnnnnnnnnnnnnnnnnnnnnnnnnnnnnnnnnnnnnnnnnnnnnnnnnnnnnnnnnnnnnnnnnnnnnnnnnnnnnnnnnnnnnnnnnnnnnnnnnnnnnnnnnnnnnnnnnnnnnnnnnnnnnnnnnnnnnnnnnnnnnnnnnnnnnnnnnnnnnnnnnnnnnnnnnnnnnnnnnnnnnnnnnnnnnnnnnnnnnnnnnnnnnnnnnnnnnnnnnnnnnnnnnnnnnnnnnnnnnnnnnnnnnnnnnnnnnnnnnnnnnnnnnnnnnnnnnnnnnnnnnnnnnnnnnnnnnnnnnnnnnnnnnnnnnnnnnnnnnnnnnnnnnnnnnnnnnnnnnnnnnnnnnnnnnnnnnnnnnnnnnnnnnnnnnnnnnnnnnnnnnnnnnnnnnnnnnnnnnnnnnnnnnnnnnnnnnnnnnnnnnnnnnnnnnnnnnnnnnnnnnnnnnnnnnnnnnnnnnnnnnnnnnnnnnnnnnnnnnnnnnnnnnnnnnnnnnnnnnnnnnnnnnnnnnnnnnnnnnnnnnnnnnnnnnnnnnnnnnnnnnnnnnnnnnnnnnnnnnnnnnnnnnnnnnnnnnnnnnnnnnnnnnnnnnnnnnnnnnnnnnnnnnnnnnnnnnnnnnnnnnnnnnnnnnnnnnnnnnnnnnnnnnnnnnnnnnnnnnnnnnnnnnnnnnnnnnnnnnnnnnnnnnnnnnnnnnnnnnnnnnnnnnnnnnnnnnnnnnnnnnnnnnnnnnnnnnnnnnnnnnnnnnnnnnnnnnnnnnnnnnnnnnnnnnnnnnnnnnnnnnnnnnnnnnnnnnnnnnnnnnnnnnnnnnnnnnnnnnnnnnnnnnnnnnnnnnnnnnnnnnnnnnnnnnnnnnnnnnnnnnnnnnnnnnnnnnnnnnnnnnnnnnnnnnnnnnnnnnnnnnnnnnnnnnnnnnnnnnnnnnnnnnnnnnnnnnnnnnnnnnnnnnnnnnnnnnnnnnnnnnnnnnnnnnnnnnnnnnnnnnnnnnnnnnnnnnnnnnnnnnnnnnnnnnnnnnnnnnnnnnnnnnnnnnnnnnnnnnnnnnnnnnnnnnnnnnnnnnnnnnnnnnnnnnnnnnnnnnnnnnnnnnnnnnnnnnnnnnnnnnnnnnnnnnnnnnnnnnnnnnnnnnnnnnnnnnnnnnnnnnnnnnnnnnnnnnnnnnnnnnnnnnnnnnnnnnnnnnnnnnnnnnnnnnnnnnnnnnnnnnnnnnnnnnnnnnnnnnnnnnnnnnnnnnnnnnnnnnnnnnnnnnnnnnnnnnnnnnnnnnnnnnnnnnnnnnnnnnnnnnnnnnnnnnnnnnnnnnnnnnnnnnnnnnnnnnnnnnnnnnnnnnnnnnnnnnnnnnnnnnnnnnnnnnnnnnnnnnnnnnnnnnnnnnnnnnnnnnnnnnnnnnnnnnnnnnnnnnnnnnnnnnnnnnnnnnnnnnnnnnnnnnnnnnnnnnnnnnnnnnnnnnnnnnnnnnnnnnnnnnnnnnnnnnnnnnnnnnnnnnnnnnnnnnnnnnnnnnnnnnnnnnnnnnnnnnnnnnnnnnnnnnnnnnnnnnnnnnnnnnnnnnnnnnnnnnnnnnnnnnnnnnnnnnnnnnnnnnnnnnnnnnnnnnnnnnnnnnnnnnnnnnnnnnnnnnnnnnnnnnnnnnnnnnnnnnnnnnnnnnnnnnnnnnnnnnnnnnnnnnnnnnnnnnnnnnnnnnnnnnnnnnnnnnnnnnnnnnnnnnnnnnnnnnnnnnnnnnnnnnnnnnnnnnnnnnnnnnnnnnnnnnnnnnnnnnnnnnnnnnnnnnnnnnnnnnnnnnnnnnnnnnnnnnnnnnnnnnnnnnnnnnnnnnnnnnnnnnnnnnnnnnnnnnnnnnnnnnnnnnnnnnnnnnnnnnnnnnnnnnnnnnnnnnnnnnnnnnnnnnnnnnnnnnnnnnnnnnnnnnnnnnnnnnnnnnnnnnnnnnnnnnnnnnnnnnnnnnnnnnnnnnnnnnnnnnnnnnnnnnnnnnnnnnnnnnnnnnnnnnnnnnnnnnnnnnnnnnnnnnnnnnnnnnnnnnnnnnnnnnnnnnnnnnnnnnnnnnnnnnnnnnnnnnnnnnnnnnnnnnnnnnnnnnnnnnnnnnnnnnnnnnnnnnnnnnnnnnnnnnnnnnnnnnnnnnnnnnnnnnnnnnnnnnnnnnnnnnnnnnnnnnnnnnnnnnnnnnnnnnnnnnnnnnnnnnnnnnnnnnnnnnnnnnnnnnnnnnnnnnnnnnnnnnnnnnnnnnnnnnnnnnnnnnnnnnnnnnnnnnnnnnnnnnnnnnnnnnnnnnnnnnnnnnnnnnnnnnnnnnnnnnnnnnnnnnnnnnnnnnnnnnnnnnnnnnnnnnnnnnnnnnnnnnnnnnnnnnnnnnnnnnnnnnnnnnnnnnnnnnnnnnnnnnnnnnnnnnnnnnnnnnnnnnnnnnnnnnnnnnnnnnnnnnnnnnnnnnnnnnnnnnnnnnnnnnnnnnnnnnnnnnnnnnnnnnnnnnnnnnnnnnnnnnnnnnnnnnnnnnnnnnnnnnnnnnnnnnnnnnnnnnnnnnnnnnnnnnnnnnnnnnnnnnnnnnnnnnnnnnnnnnnnnnnnnnnnnnnnnnnnnnnnnnnnnnnnnnnnnnnnnnnnnnnnnnnnnnnnnnnnnnnnnnnnnnnnnnnnnnnnnnnnnnnnnnnnnnnnnnnnnnnnnnnnnnnnnnnnnnnnnnnnnnnnnnnnnnnnnnnnnnnnnnnnnnnnnnnnnnnnnnnnnnnnnnnnnnnnnnnnnnnnnnnnnnnnnnnnnnnnnnnnnnnnnnnnnnnnnnnnnnnnnnnnnnnnnnnnnnnnnnnnnnnnnnnnnnnnnnnnnnnnnnnnnnnnnnnnnnnnnnnnnnnnnnnnnnnnnnnnnnnnnnnnnnnnnnnnnnnnnnnnnnnnnnnnnnnnnnnnnnnnnnnnnnnnnnnnnnnnnnnnnnnnnnnnnnnnnnnnnnnnnnnnnnnnnnnnnnnnnnnnnnnnnnnnnnnnnnnnnnnnnnnnnnnnnnnnnnnnnnnnnnnnnnnnnnnnnnnnnnnnnnnnnnnnnnnnnnnnnnnnnnnnnnnnnnnnnnnnnnnnnnnnnnnnnnnnnnnnnnnnnnnnnnnnnnnnnnnnnnnnnnnnnnnnnnnnnnnnnnnnnnnnnnnnnnnnnnnnnnnnnnnnnnnnnnnnnnnnnnnnnnnnnnnnnnnnnnnnnnnnnnnnnnnnnnnnnnnnnnnnnnnnnnnnnnnnnnnnnnnnnnnnnnnnnnnnnnnnnnnnnnnnnnnnnnnnnnnnnnnnnnnnnnnnnnnnnnnnnnnnnnnnnnnnnnnnnnnnnnnnnnnnnnnnnnnnnnnnnnnnnnnnnnnnnnnnnnnnnnnnnnnnnnnnnnnnnnnnnnnnnnnnnnnnnnnnnnnnnnnnnnnnnnnnnnnnnnnnnnnnnnnnnnnnnnnnnnnnnnnnnnnnnnnnnnnnnnnnnnnnnnnnnnnnnnnnnnnnnnnnnnnnnnnnnnnnnnnnnnnnnnnnnnnnnnnnnnnnnnnnnnnnnnnnnnnnnnnnnnnnnnnnnnnnnnnnnnnnnnnnnnnnnnnnnnnnnnnnnnnnnnnnnnnnnnnnnnnnnnnnnnnnnnnnnnnnnnnnnnnnnnnnnnnnnnnnnnnnnnnnnnnnnnnnnnnnnnnnnnnnnnnnnnnnnnnnnnnnnnnnnnnnnnnnnnnnnnnnnnnnnnnnnnnnnnnnnnnnnnnnnnnnnnnnnnnnnnnnnnnnnnnnnnnnnnnnnnnnnnnnnnnnnnnnnnnnnnnnnnnnnnnnnnnnnnnnnnnnnnnnnnnnnnnnnnnnnnnnnnnnnnnnnnnnnnnnnnnnnnnnnnnnnnnnnnnnnnnnnnnnnnnnnnnnnnnnnnnnnnnnnnnnnnnnnnnnnnnnnnnnnnnnnnnnnnnnnnnnnnnnnnnnnnnnnnnnnnnnnnnnnnnnnnnnnnnnnnnnnnnnnnnnnnnnnnnnnnnnnnnnnnnnnnnnnnnnnnnnnnnnnnnnnnnnnnnnnnnnnnnnnnnnnnnnnnnnnnnnnnnnnnnnnnnnnnnnnnnnnnnnnnnnnnnnnnnnnnnnnnnnnnnnnnnnnnnnnnnnnnnnnnnnnnnnnnnnnnnnnnnnnnnnnnnnnnnnnnnnnnnnnnnnnnnnnnnnnnnnnnnnnnnnnnnnnnnnnnnnnnnnnnnnnnnnnnnnnnnnnnnnnnnnnnnnnnnnnnnnnnnnnnnnnnnnnnnnnnnnnnnnnnnnnnnnnnnnnnnnnnnnnnnnnnnnnnnnnnnnnnnnnnnnnnnnnnnnnnnnnnnnnnnnnnnnnnnnnnnnnnnnnnnnnnnnnnnnnnnnnnnnnnnnnnnnnnnnnnnnnnnnnnnnnnnnnnnnnnnnnnnnnnnnnnnnnnnnnnnnnnnnnnnnnnnnnnnnnnnnnnnnnnnnnnnnnnnnnnnnnnnnnnnnnnnnnnnnnnnnnnnnnnnnnnnnnnnnnnnnnnnnnnnnnnnnnnnnnnnnnnnnnnnnnnnnnnnnnnnnnnnnnnnnnnnnnnnnnnnnnnnnnnnnnnnnnnnnnnnnnnnnnnnnnnnnnnnnnnnnnnnnnnnnnnnnnnnnnnnnnnnnnnnnnnnnnnnnnnnnnnnnnnnnnnnnnnnnnnnnnnnnnnnnnnnnnnnnnnnnnnnnnnnnnnnnnnnnnnnnnnnnnnnnnnnnnnnnnnnnnnnnnnnnnnnnnnnnnnnnnnnnnnnnnnnnnnnnnnnnnnnnnnnnnnnnnnnnnnnnnnnnnnnnnnnnnnnnnnnnnnnnnnnnnnnnnnnnnnnnnnnnnnnnnnnnnnnnnnnnnnnnnnnnnnnnnnnnnnnnnnnnnnnnnnnnnnnnnnnnnnnnnnnnnnnnnnnnnnnnnnnnnnnnnnnnnnnnnnnnnnnnnnnnnnnnnnnnnnnnnnnnnnnnnnnnnnnnnnnnnnnnnnnnnnnnnnnnnnnnnnnnnnnnnnnnnnnnnnnnnnnnnnnnnnnnnnnnnnnnnnnnnnnnnnnnnnnnnnnnnnnnnnnnnnnnnnnnnnnnnnnnnnnnnnnnnnnnnnnnnnnnnnnnnnnnnnnnnnnnnnnnnnnnnnnnnnnnnnnnnnnnnnnnnnnnnnnnnnnnnnnnnnnnnnnnnnnnnnnnnnnnnnnnnnnnnnnnnnnnnnnnnnnnnnnnnnnnnnnnnnnnnnnnnnnnnnnnnnnnnnnnnnnnnnnnnnnnnnnnnnnnnnnnnnnnnnnnnnnnnnnnnnnnnnnnnnnnnnnnnnnnnnnnnnnnnnnnnnnnnnnnnnnnnnnnnnnnnnnnnnnnnnnnnnnnnnnnnnnnnnnnnnnnnnnnnnnnnnnnnnnnnnnnnnnnnnnnnnnnnnnnnnnnnnnnnnnnnnnnnnnnnnnnnnnnnnnnnnnnnnnnnnnnnnnnnnnnnnnnnnnnnnnnnnnnnnnnnnnnnnnnnnnnnnnnnnnnnnnnnnnnnnnnnnnnnnnnnnnnnnnnnnnnnnnnnnnnnnnnnnnnnnnnnnnnnnnnnnnnnnnnnnnnnnnnnnnnnnnnnnnnnnnnnnnnnnnnnnnnnnnnnnnnnnnnnnnnnnnnnnnnnnnnnnnnnnnnnnnnnnnnnnnnnnnnnnnnnnnnnnnnnnnnnnnnnnnnnnnnnnnnnnnnnnnnnnnnnnnnnnnnnnnnnnnnnnnnnnnnnnnnnnnnnnnnnnnnnnnnnnnnnnnnnnnnnnnnnnnnnnnnnnnnnnnnnnnnnnnnnnnnnnnnnnnnnnnnnnnnnnnnnnnnnnnnnnnnnnnnnnnnnnnnnnnnnnnnnnnnnnnnnnnnnnnnnnnnnnnnnnnnnnnnnnnnnnnnnnnnnnnnnnnnnnnnnnnnnnnnnnnnnnnnnnnnnnnnnnnnnnnnnnnnnnnnnnnnnnnnnnnnnnnnnnnnnnnnnnnnnnnnnnnnnnnnnnnnnnnnnnnnnnnnnnnnnnnnnnnnnnnnnnnnnnnnnnnnnnnnnnnnnnnnnnnnnnnnnnnnnnnnnnnnnnnnnnnnnnnnnnnnnnnnnnnnnnnnnnnnnnnnnnnnnnnnnnnnnnnnnnnnnnnnnnnnnnnnnnnnnnnnnnnnnnnnnnnnnnnnnnnnnnnnnnnnnnnnnnnnnnnnnnnnnnnnnnnnnnnnnnnnnnnnnnnnnnnnnnnnnnnnnnnnnnnnnnnnnnnnnnnnnnnnnnnnnnnnnnnnnnnnnnnnnnnnnnnnnnnnnnnnnnnnnnnnnnnnnnnnnnnnnnnnnnnnnnnnnnnnnnnnnnnnnnnnnnnnnnnnnnnnnnnnnnnnnnnnnnnnnnnnnnnnnnnnnnnnnnnnnnnnnnnnnnnnnnnnnnnnnnnnnnnnnnnnnnnnnnnnnnnnnnnnnnnnnnnnnnnnnnnnnnnnnnnnnnnnnnnnnnnnnnnnnnnnnnnnnnnnnnnnnnnnnnnnnnnnnnnnnnnnnnnnnnnnnnnnnnnnnnnnnnnnnnnnnnnnnnnnnnnnnnnnnnnnnnnnnnnnnnnnnnnnnnnnnnnnnnnnnnnnnnnnnnnnnnnnnnnnnnnnnnnnnnnnnnnnnnnnnnnnnnnnnnnnnnnnnnnnnnnnnnnnnnnnnnnnnnnnnnnnnnnnnnnnnnnnnnnnnnnnnnnnnnnnnnnnnnnnnnnnnnnnnnnnnnnnnnnnnnnnnnnnnnnnnnnnnnnnnnnnnnnnnnnnnnnnnnnnnnnnnnnnnnnnnnnnnnnnnnnnnnnnnnnnnnnnnnnnnnnnnnnnnnnnnnnnnnnnnnnnnnnnnnnnnnnnnnnnnnnnnnnnnnnnnnnnnnnnnnnnnnnnnnnnnnnnnnnnnnnnnnnnnnnnnnnnnnnnnnnnnnnnnnnnnnnnnnnnnnnnnnnnnnnnnnnnnnnnnnnnnnnnnnnnnnnnnnnnnnnnnnnnnnnnnnnnnnnnnnnnnnnnnnnnnnnnnnnnnnnnnnnnnnnnnnnnnnnnnnnnnnnnnnnnnnnnnnnnnnnnnnnnnnnnnnnnnnnnnnnnnnnnnnnnnnnnnnnnnnnnnnnnnnnnnnnnnnnnnnnnnnnnnnnnnnnnnnnnnnnnnnnnnnnnnnnnnnnnnnnnnnnnnnnnnnnnnnnnnnnnnnnnnnnnnnnnnnnnnnnnnnnnnnnnnnnnnnnnnnnnnnnnnnnnnnnnnnnnnnnnnnnnnnnnnnnnnnnnnnnnnnnnnnnnnnnnnnnnnnnnnnnnnnnnnnnnnnnnnnnnnnnnnnnnnnnnnnnnnnnnnnnnnnnnnnnnnnnnnnnnnnnnnnnnnnnnnnnnnnnnnnnnnnnnnnnnnnnnnnnnnnnnnnnnnnnnnnnnnnnnnnnnnnnnnnnnnnnnnnnnnnnnnnnnnnnnnnnnnnnnnnnnnnnnnnnnnnnnnnnnnnnnnnnnnnnnnnnnnnnnnnnnnnnnnnnnnnnnnnnnnnnnnnnnnnnnnnnnnnnnnnnnnnnnnnnnnnnnnnnnnnnnnnnnnnnnnnnnnnnnnnnnnnnnnnnnnnnnnnnnnnnnnnnnnnnnnnnnnnnnnnnnnnnnnnnnnnnnnnnnnnnnnnnnnnnnnnnnnnnnnnnnnnnnnnnnnnnnnnnnnnnnnnnnnnnnnnnnnnnnnnnnnnnnnnnnnnnnnnnnnnnnnnnnnnnnnnnnnnnnnnnnnnnnnnnnnnnnnnnnnnnnnnnnnnnnnnnnnnnnnnnnnnnnnnnnnnnnnnnnnnnnnnnnnnnnnnnnnnnnnnnnnnnnnnnnnnnnnnnnnnnnnnnnnnnnnnnnnnnnnnnnnnnnnnnnnnnnnnnnnnnnnnnnnnnnnnnnnnnnnnnnnnnnnnnnnnnnnnnnnnnnnnnnnnnnnnnnnnnnnnnnnnnnnnnnnnnnnnnnnnnnnnnnnnnnnnnnnnnnnnnnnnnnnnnnnnnnnnnnnnnnnnnnnnnnnnnnnnnnnnnnnnnnnnnnnnnnnnnnnnnnnnnnnnnnnnnnnnnnnnnnnnnnnnnnnnnnnnnnnnnnnnnnnnnnnnnnnnnnnnnnnnnnnnnnnnnnnnnnnnnnnnnnnnnnnnnnnnnnnnnnnnnnnnnnnnnnnnnnnnnnnnnnnnnnnnnnnnnnnnnnnnnnnnnnnnnnnnnnnnnnnnnnnnnnnnnnnnnnnnnnnnnnnnnnnnnnnnnnnnnnnnnnnnnnnnnnnnnnnnnnnnnnnnnnnnnnnnnnnnnnnnnnnnnnnnnnnnnnnnnnnnnnnnnnnnnnnnnnnnnnnnnnnnnnnnnnnnnnnnnnnnnnnnnnnnnnnnnnnnnnnnnnnnnnnnnnnnnnnnnnnnnnnnnnnnnnnnnnnnnnnnnnnnnnnnnnnnnnnnnnnnnnnnnnnnnnnnnnnnnnnnnnnnnnnnnnnnnnnnnnnnnnnnnnnnnnnnnnnnnnnnnnnnnnnnnnnnnnnnnnnnnnnnnnnnnnnnnnnnnnnnnnnnnnnnnnnnnnnnnnnnnnnnnnnnnnnnnnnnnnnnnnnnnnnnnnnnnnnnnnnnnnnnnnnnnnnnnnnnnnnnnnnnnnnnnnnnnnnnnnnnnnnnnnnnnnnnnnnnnnnnnnnnnnnnnnnnnnnnnnnnnnnnnnnnnnnnnnnnnnnnnnnnnnnnnnnnnnnnnnnnnnnnnnnnnnnnnnnnnnnnnnnnnnnnnnnnnnnnnnnnnnnnnnnnnnnnnnnnnnnnnnnnnnnnnnnnnnnnnnnnnnnnnnnnnnnnnnnnnnnnnnnnnnnnnnnnnnnnnnnnnnnnnnnnnnnnnnnnnnnnnnnnnnnnnnnnnnnnnnnnnnnnnnnnnnnnnnnnnnnnnnnnnnnnnnnnnnnnnnnnnnnnnnnnnnnnnnnnnnnnnnnnnnnnnnnnnnnnnnnnnnnnnnnnnnnnnnnnnnnnnnnnnnnnnnnnnnnnnnnnnnnnnnnnnnnnnnnnnnnnnnnnnnnnnnnnnnnnnnnnnnnnnnnnnnnnnnnnnnnnnnnnnnnnnnnnnnnnnnnnnnnnnnnnnnnnnnnnnnnnnnnnnnnnnnnnnnnnnnnnnnnnnnnnnnnnnnnnnnnnnnnnnnnnnnnnnnnnnnnnnnnnnnnnnnnnnnnnnnnnnnnnnnnnnnnnnnnnnnnnnnnnnnnnnnnnnnnnnnnnnnnnnnnnnnnnnnnnnnnnnnnnnnnnnnnnnnnnnnnnnnnnnnnnnnnnnnnnnnnnnnnnnnnnnnnnnnnnnnnnnnnnnnnnnnnnnnnnnnnnnnnnnnnnnnnnnnnnnnnnnnnnnnnnnnnnnnnnnnnnnnnnnnnnnnnnnnnnnnnnnnnnnnnnnnnnnnnnnnnnnnnnnnnnnnnnnnnnnnnnnnnnnnnnnnnnnnnnnnnnnnnnnnnnnnnnnnnnnnnnnnnnnnnnnnnnnnnnnnnnnnnnnnnnnnnnnnnnnnnnnnnnnnnnnnnnnnnnnnnnnnnnnnnnnnnnnnnnnnnnnnnnnnnnnnnnnnnnnnnnnnnnnnnnnnnnnnnnnnnnnnnnnnnnnnnnnnnnnnnnnnnnnnnnnnnnnnnnnnnnnnnnnnnnnnnnnnnnnnnnnnnnnnnnnnnnnnnnnnnnnnnnnnnnnnnnnnnnnnnnnnnnnnnnnnnnnnnnnnnnnnnnnnnnnnnnnnnnnnnnnnnnnnnnnnnnnnnnnnnnnnnnnnnnnnnnnnnnnnnnnnnnnnnnnnnnnnnnnnnnnnnnnnnnnnnnnnnnnnnnnnnnnnnnnnnnnnnnnnnnnnnnnnnnnnnnnnnnnnnnnnnnnnnnnnnnnnnnnnnnnnnnnnnnnnnnnnnnnnnnnnnnnnnnnnnnnnnnnnnnnnnnnnnnnnnnnnnnnnnnnnnnnnnnnnnnnnnnnnnnnnnnnnnnnnnnnnnnnnnnnnnnnnnnnnnnnnnnnnnnnnnnnnnnnnnnnnnnnnnnnnnnnnnnnnnnnnnnnnnnnnnnnnnnnnnnnnnnnnnnnnnnnnnnnnnnnnnnnnnnnnnnnnnnnnnnnnnnnnnnnnnnnnnnnnnnnnnnnnnnnnnnnnnnnnnnnnnnnnnnnnnnnnnnnnnnnnnnnnnnnnnnnnnnnnnnnnnnnnnnnnnnnnnnnnnnnnnnnnnnnnnnnnnnnnnnnnnnnnnnnnnnnnnnnnnnnnnnnnnnnnnnnnnnnnnnnnnnnnnnnnnnnnnnnnnnnnnnnnnnnnnnnnnnnnnnnnnnnnnnnnnnnnnnnnnnnnnnnnnnnnnnnnnnnnnnnnnnnnnnnnnnnnnnnnnnnnnnnnnnnnnnnnnnnnnnnnnnnnnnnnnnnnnnnnnnnnnnnnnnnnnnnnnnnnnnnnnnnnnnnnnnnnnnnnnnnnnnnnnnnnnnnnnnnnnnnnnnnnnnnnnnnnnnnnnnnnnnnnnnnnnnnnnnnnnnnnnnnnnnnnnnnnnnnnnnnnnnnnnnnnnnnnnnnnnnnnnnnnnnnnnnnnnnnnnnnnnnnnnnnnnnnnnnnnnnnnnnnnnnnnnnnnnnnnnnnnnnnnnnnnnnnnnnnnnnnnnnnnnnnnnnnnnnnnnnnnnnnnnnnnnnnnnnnnnnnnnnnnnnnnnnnnnnnnnnnnnnnnnnnnnnnnnnnnnnnnnnnnnnnnnnnnnnnnnnnnnnnnnnnnnnnnnnnnnnnnnnnnnnnnnnnnnnnnnnnnnnnnnnnnnnnnnnnnnnnnnnnnnnnnnnnnnnnnnnnnnnnnnnnnnnnnnnnnnnnnnnnnnnnnnnnnnnnnnnnnnnnnnnnnnnnnnnnnnnnnnnnnnnnnnnnnnnnnnnnnnnnnnnnnnnnnnnnnnnnnnnnnnnnnnnnnnnnnnnnnnnnnnnnnnnnnnnnnnnnnnnnnnnnnnnnnnnnnnnnnnnnnnnnnnnnnnnnnnnnnnnnnnnnnnnnnnnnnnnnnnnnnnnnnnnnnnnnnnnnnnnnnnnnnnnnnnnnnnnnnnnnnnnnnnnnnnnnnnnnnnnnnnnnnnnnnnnnnnnnnnnnnnnnnnnnnnnnnnnnnnnnnnnnnnnnnnnnnnnnnnnnnnnnnnnnnnnnnnnnnnnnnnnnnnnnnnnnnnnnnnnnnnnnnnnnnnnnnnnnnnnnnnnnnnnnnnnnnnnnnnnnnnnnnnnnnnnnnnnnnnnnnnnnnnnnnnnnnnnnnnnnnnnnnnnnnnnnnnnnnnnnnnnnnnnnnnnnnnnnnnnnnnnnnnnnnnnnnnnnnnnnnnnnnnnnnnnnnnnnnnnnnnnnnnnnnnnnnnnnnnnnnnnnnnnnnnnnnnnnnnnnnnnnnnnnnnnnnnnnnnnnnnnnnnnnnnnnnnnnnnnnnnnnnnnnnnnnnnnnnnnnnnnnnnnnnnnnnnnnnnnnnnnnnnnnnnnnnnnnnnnnnnnnnnnnnnnnnnnnnnnnnnnnnnnnnnnnnnnnnnnnnnnnnnnnnnnnnnnnnnnnnnnnnnnnnnnnnnnnnnnnnnnnnnnnnnnnnnnnnnnnnnnnnnnnnnnnnnnnnnnnnnnnnnnnnnnnnnnnnnnnnnnnnnnnnnnnnnnnnnnnnnnnnnnnnnnnnnnnnnnnnnnnnnnnnnnnnnnnnnnnnnnnnnnnnnnnnnnnnnnnnnnnnnnnnnnnnnnnnnnnnnnnnnnnnnnnnnnnnnnnnnnnnnnnnnnnnnnnnnnnnnnnnnnnnnnnnnnnnnnnnnnnnnnnnnnnnnnnnnnnnnnnnnnnnnnnnnnnnnnnnnnnnnnnnnnnnnnnnnnnnnnnnnnnnnnnnnnnnnnnnnnnnnnnnnnnnnnnnnnnnnnnnnnnnnnnnnnnnnnnnnnnnnnnnnnnnnnnnnnnnnnnnnnnnnnnnnnnnnnnnnnnnnnnnnnnnnnnnnnnnnnnnnnnnnnnnnnnnnnnnnnnnnnnnnnnnnnnnnnnnnnnnnnnnnnnnnnnnnnnnnnnnnnnnnnnnnnnnnnnnnnnnnnnnnnnnnnnnnnnnnnnnnnnnnnnnnnnnnnnnnnnnnnnnnnnnnnnnnnnnnnnnnnnnnnnnnnnnnnnnnnnnnnnnnnnnnnnnnnnnnnnnnnnnnnnnnnnnnnnnnnnnnnnnnnnnnnnnnnnnnnnnnnnnnnnnnnnnnnnnnnnnnnnnnnnnnnnnnnnnnnnnnnnnnnnnnnnnnnnnnnnnnnnnnnnnnnnnnnnnnnnnnnnnnnnnnnnnnnnnnnnnnnnnnnnnnnnnnnnnnnnnnnnnnnnnnnnnnnnnnnnnnnnnnnnnnnnnnnnnnnnnnnnnnnnnnnnnnnnnnnnnnnnnnnnnnnnnnnnnnnnnnnnnnnnnnnnnnnnnnnnnnnnnnnnnnnnnnnnnnnnnnnnnnnnnnnnnnnnnnnnnnnnnnnnnnnnnnnnnnnnnnnnnnnnnnnnnnnnnnnnnnnnnnnnnnnnnnnnnnnnnnnnnnnnnnnnnnnnnnnnnnnnnnnnnnnnnnnnnnnnnnnnnnnnnnnnnnnnnnnnnnnnnnnnnnnnnnnnnnnnnnnnnnnnnnnnnnnnnnnnnnnnnnnnnnnnnnnnnnnnnnnnnnnnnnnnnnnnnnnnnnnnnnnnnnnnnnnnnnnnnnnnnnnnnnnnnnnnnnnnnnnnnnnnnnnnnnnnnnnnnnnnnnnnnnnnnnnnnnnnnnnnnnnnnnnnnnnnnnnnnnnnnnnnnnnnnnnnnnnnnnnnnnnnnnnnnnnnnnnnnnnnnnnnnnnnnnnnnnnnnnnnnnnnnnnnnnnnnnnnnnnnnnnnnnnnnnnnnnnnnnnnnnnnnnnnnnnnnnnnnnnnnnnnnnnnnnnnnnnnnnnnnnnnnnnnnnnnnnnnnnnnnnnnnnnnnnnnnnnnnnnnnnnnnnnnnnnnnnnnnnnnnnnnnnnnnnnnnnnnnnnnnnnnnnnnnnnnnnnnnnnnnnnnnnnnnnnnnnnnnnnnnnnnnnnnnnnnnnnnnnnnnnnnnnnnnnnnnnnnnnnnnnnnnnnnnnnnnnnnnnnnnnnnnnnnnnnnnnnnnnnnnnnnnnnnnnnnnnnnnnnnnnnnnnnnnnnnnnnnnnnnnnnnnnnnnnnnnnnnnnnnnnnnnnnnnnnnnnnnnnnnnnnnnnnnnnnnnnnnnnnnnnnnnnnnnnnnnnnnnnnnnnnnnnnnnnnnnnnnnnnnnnnnnnnnnnnnnnnnnnnnnnnnnnnnnnnnnnnnnnnnnnnnnnnnnnnnnnnnnnnnnnnnnnnnnnnnnnnnnnnnnnnnnnnnnnnnnnnnnnnnnnnnnnnnnnnnnnnnnnnnnnnnnnnnnnnnnnnnnnnnnnnnnnnnnnnnnnnnnnnnnnnnnnnnnnnnnnnnnnnnnnnnnnnnnnnnnnnnnnnnnnnnnnnnnnnnnnnnnnnnnnnnnnnnnnnnnnnnnnnnnnnnnnnnnnnnnnnnnnnnnnnnnnnnnnnnnnnnnnnnnnnnnnnnnnnnnnnnnnnnnnnnnnnnnnnnnnnnnnnnnnnnnnnnnnnnnnnnnnnnnnnnnnnnnnnnnnnnnnnnnnnnnnnnnnnnnnnnnnnnnnnnnnnnnnnnnnnnnnnnnnnnnnnnnnnnnnnnnnnnnnnnnnnnnnnnnnnnnnnnnnnnnnnnnnnnnnnnnnnnnnnnnnnnnnnnnnnnnnnnnnnnnnnnnnnnnnnnnnnnnnnnnnnnnnnnnnnnnnnnnnnnnnnnnnnnnnnnnnnnnnnnnnnnnnnnnnnnnnnnnnnnnnnnnnnnnnnnnnnnnnnnnnnnnnnnnnnnnnnnnnnnnnnnnnnnnnnnnnnnnnnnnnnnnnnnnnnnnnnnnnnnnnnnnnnnnnnnnnnnnnnnnnnnnnnnnnnnnnnnnnnnnnnnnnnnnnnnnnnnnnnnnnnnnnnnnnnnnnnnnnnnnnnnnnnnnnnnnnnnnnnnnnnnnnnnnnnnnnnnnnnnnnnnnnnnnnnnnnnnnnnnnnnnnnnnnnnnnnnnnnnnnnnnnnnnnnnnnnnnnnnnnnnnnnnnnnnnnnnnnnnnnnnnnnnnnnnnnnnnnnnnnnnnnnnnnnnnnnnnnnnnnnnnnnnnnnnnnnnnnnnnnnnnnnnnnnnnnnnnnnnnnnnnnnnnnnnnnnnnnnnnnnnnnnnnnnnnnnnnnnnnnnnnnnnnnnnnnnnnnnnnnnnnnnnnnnnnnnnnnnnnnnnnnnnnnnnnnnnnnnnnnnnnnnnnnnnnnnnnnnnnnnnnnnnnnnnnnnnnnnnnnnnnnnnnnnnnnnnnnnnnnnnnnnnnnnnnnnnnnnnnnnnnnnnnnnnnnnnnnnnnnnnnnnnnnnnnnnnnnnnnnnnnnnnnnnnnnnnnnnnnnnnnnnnnnnnnnnnnnnnnnnnnnnnnnnnnnnnnnnnnnnnnnnnnnnnnnnnnnnnnnnnnnnnnnnnnnnnnnnnnnnnnnnnnnnnnnnnnnnnnnnnnnnnnnnnnnnnnnnnnnnnnnnnnnnnnnnnnnnnnnnnnnnnnnnnnnnnnnnnnnnnnnnnnnnnnnnnnnnnnnnnnnnnnnnnnnnnnnnnnnnnnnnnnnnnnnnnnnnnnnnnnnnnnnnnnnnnnnnnnnnnnnnnnnnnnnnnnnnnnnnnnnnnnnnnnnnnnnnnnnnnnnnnnnnnnnnnnnnnnnnnnnnnnnnnnnnnnnnnnnnnnnnnnnnnnnnnnnnnnnnnnnnnnnnnnnnnnnnnnnnnnnnnnnnnnnnnnnnnnnnnnnnnnnnnnnnnnnnnnnnnnnnnnnnnnnnnnnnnnnnnnnnnnnnnnnnnnnnnnnnnnnnnnnnnnnnnnnnnnnnnnnnnnnnnnnnnnnnnnnnnnnnnnnnnnnnnnnnnnnnnnnnnnnnnnnnnnnnnnnnnnnnnnnnnnnnnnnnnnnnnnnnnnnnnnnnnnnnnnnnnnnnnnnnnnnnnnnnnnnnnnnnnnnnnnnnnnnnnnnnnnnnnnnnnnnnnnnnnnnnnnnnnnnnnnnnnnnnnnnnnnnnnnnnnnnnnnnnnnnnnnnnnnnnnnnnnnnnnnnnnnnnnnnnnnnnnnnnnnnnnnnnnnnnnnnnnnnnnnnnnnnnnnnnnnnnnnnnnnnnnnnnnnnnnnnnnnnnnnnnnnnnnnnnnnnnnnnnnnnnnnnnnnnnnnnnnnnnnnnnnnnnnnnnnnnnnnnnnnnnnnnnnnnnnnnnnnnnnnnnnnnnnnnnnnnnnnnnnnnnnnnnnnnnnnnnnnnnnnnnnnnnnnnnnnnnnnnnnnnnnnnnnnnnnnnnnnnnnnnnnnnnnnnnnnnnnnnnnnnnnnnnnnnnnnnnnnnnnnnnnnnnnnnnnnnnnnnnnnnnnnnnnnnnnnnnnnnnnnnnnnnnnnnnnnnnnnnnnnnnnnnnnnnnnnnnnnnnnnnnnnnnnnnnnnnnnnnnnnnnnnnnnnnnnnnnnnnnnnnnnnnnnnnnnnnnnnnnnnnnnnnnnnnnnnnnnnnnnnnnnnnnnnnnnnnnnnnnnnnnnnnnnnnnnnnnnnnnnnnnnnnnnnnnnnnnnnnnnnnnnnnnnnnnnnnnnnnnnnnnnnnnnnnnnnnnnnnnnnnnnnnnnnnnnnnnnnnnnnnnnnnnnnnnnnnnnnnnnnnnnnnnnnnnnnnnnnnnnnnnnnnnnnnnnnnnnnnnnnnnnnnnnnnnnnnnnnnnnnnnnnnnnnnnnnnnnnnnnnnnnnnnnnnnnnnnnnnnnnnnnnnnnnnnnnnnnnnnnnnnnnnnnnnnnnnnnnnnnnnnnnnnnnnnnnnnnnnnnnnnnnnnnnnnnnnnnnnnnnnnnnnnnnnnnnnnnnnnnnnnnnnnnnnnnnnnnnnnnnnnnnnnnnnnnnnnnnnnnnnnnnnnnnnnnnnnnnnnnnnnnnnnnnnnnnnnnnnnnnnnnnnnnnnnnnnnnnnnnnnnnnnnnnnnnnnnnnnnnnnnnnnnnnnnnnnnnnnnnnnnnnnnnnnnnnnnnnnnnnnnnnnnnnnnnnnnnnnnnnnnnnnnnnnnnnnnnnnnnnnnnnnnnnnnnnnnnnnnnnnnnnnnnnnnnnnnnnnnnnnnnnnnnnnnnnnnnnnnnnnnnnnnnnnnnnnnnnnnnnnnnnnnnnnnnnnnnnnnnnnnnnnnnnnnnnnnnnnnnnnnnnnnnnnnnnnnnnnnnnnnnnnnnnnnnnnnnnnnnnnnnnnnnnnnnnnnnnnnnnnnnnnnnnnnnnnnnnnnnnnnnnnnnnnnnnnnnnnnnnnnnnnnnnnnnnnnnnnnnnnnnnnnnnnnnnnnnnnnnnnnnnnnnnnnnnnnnnnnnnnnnnnnnnnnnnnnnnnnnnnnnnnnnnnnnnnnnnnnnnnnnnnnnnnnnnnnnnnnnnnnnnnnnnnnnnnnnnnnnnnnnnnnnnnnnnnnnnnnnnnnnnnnnnnnnnnnnnnnnnnnnnnnnnnnnnnnnnnnnnnnnnnnnnnnnnnnnnnnnnnnnnnnnnnnnnnnnnnnnnnnnnnnnnnnnnnnnnnnnnnnnnnnnnnnnnnnnnnnnnnnnnnnnnnnnnnnnnnnnnnnnnnnnnnnnnnnnnnnnnnnnnnnnnnnnnnnnnnnnnnnnnnnnnnnnnnnnnnnnnnnnnnnnnnnnnnnnnnnnnnnnnnnnnnnnnnnnnnnnnnnnnnnnnnnnnnnnnnnnnnnnnnnnnnnnnnnnnnnnnnnnnnnnnnnnnnnnnnnnnnnnnnnnnnnnnnnnnnnnnnnnnnnnnnnnnnnnnnnnnnnnnnnnnnnnnnnnnnnnnnnnnnnnnnnnnnnnnnnnnnnnnnnnnnnnnnnnnnnnnnnnnnnnnnnnnnnnnnnnnnnnnnnnnnnnnnnnnnnnnnnnnnnnnnnnnnnnnnnnnnnnnnnnnnnnnnnnnnnnnnnnnnnnnnnnnnnnnnnnnnnnnnnnnnnnnnnnnnnnnnnnnnnnnnnnnnnnnnnnnnnnnnnnnnnnnnnnnnnnnnnnnnnnnnnnnnnnnnnnnnnnnnnnnnnnnnnnnnnnnnnnnnnnnnnnnnnnnnnnnnnnnnnnnnnnnnnnnnnnnnnnnnnnnnnnnnnnnnnnnnnnnnnnnnnnnnnnnnnnnnnnnnnnnnnnnnnnnnnnnnnnnnnnnnnnnnnnnnnnnnnnnnnnnnnnnnnnnnnnnnnnnnnnnnnnnnnnnnnnnnnnnnnnnnnnnnnnnnnnnnnnnnnnnnnnnnnnnnnnnnnnnnnnnnnnnnnnnnnnnnnnnnnnnnnnnnnnnnnnnnnnnnnnnnnnnnnnnnnnnnnnnnnnnnnnnnnnnnnnnnnnnnnnnnnnnnnnnnnnnnnnnnnnnnnnnnnnnnnnnnnnnnnnnnnnnnnnnnnnnnnnnnnnnnnnnnnnnnnnnnnnnnnnnnnnnnnnnnnnnnnnnnnnnnnnnnnnnnnnnnnnnnnnnnnnnnnnnnnnnnnnnnnnnnnnnnnnnnnnnnnnnnnnnnnnnnnnnnnnnnnnnnnnnnnnnnnnnnnnnnnnnnnnnnnnnnnnnnnnnnnnnnnnnnnnnnnnnnnnnnnnnnnnnnnnnnnnnnnnnnnnnnnnnnnnnnnnnnnnnnnnnnnnnnnnnnnnnnnnnnnnnnnnnnnnnnnnnnnnnnnnnnnnnnnnnnnnnnnnnnnnnnnnnnnnnnnnnnnnnnnnnnnnnnnnnnnnnnnnnnnnnnnnnnnnnnnnnnnnnnnnnnnnnnnnnnnnnnnnnnnnnnnnnnnnnnnnnnnnnnnnnnnnnnnnnnnnnnnnnnnnnnnnnnnnnnnnnnnnnnnnnnnnnnnnnnnnnnnnnnnnnnnnnnnnnnnnnnnnnnnnnnnnnnnnnnnnnnnnnnnnnnnnnnnnnnnnnnnnnnnnnnnnnnnnnnnnnnnnnnnnnnnnnnnnnnnnnnnnnnnnnnnnnnnnnnnnnnnnnnnnnnnnnnnnnnnnnnnnnnnnnnnnnnnnnnnnnnnnnnnnnnnnnnnnnnnnnnnnnnnnnnnnnnnnnnnnnnnnnnnnnnnnnnnnnnnnnnnnnnnnnnnnnnnnnnnnnnnnnnnnnnnnnnnnnnnnnnnnnnnnnnnnnnnnnnnnnnnnnnnnnnnnnnnnnnnnnnnnnnnnnnnnnnnnnnnnnnnnnnnnnnnnnnnnnnnnnnnnnnnnnnnnnnnnnnnnnnnnnnnnnnnnnnnnnnnnnnnnnnnnnnnnnnnnnnnnnnnnnnnnnnnnnnnnnnnnnnnnnnnnnnnnnnnnnnnnnnnnnnnnnnnnnnnnnnnnnnnnnnnnnnnnnnnnnnnnnnnnnnnnnnnnnnnnnnnnnnnnnnnnnnnnnnnnnnnnnnnnnnnnnnnnnnnnnnnnnnnnnnnnnnnnnnnnnnnnnnnnnnnnnnnnnnnnnnnnnnnnnnnnnnnnnnnnnnnnnnnnnnnnnnnnnnnnnnnnnnnnnnnnnnnnnnnnnnnnnnnnnnnnnnnnnnnnnnnnnnnnnnnnnnnnnnnnnnnnnnnnnnnnnnnnnnnnnnnnnnnnnnnnnnnnnnnnnnnnnnnnnnnnnnnnnnnnnnnnnnnnnnnnnnnnnnnnnnnnnnnnnnnnnnnnnnnnnnnnnnnnnnnnnnnnnnnnnnnnnnnnnnnnnnnnnnnnnnnnnnnnnnnnnnnnnnnnnnnnnnnnnnnnnnnnnnnnnnnnnnnnnnnnnnnnnnnnnnnnnnnnnnnnnnnnnnnnnnnnnnnnnnnnnnnnnnnnnnnnnnnnnnnnnnnnnnnnnnnnnnnnnnnnnnnnnnnnnnnnnnnnnnnnnnnnnnnnnnnnnnnnnnnnnnnnnnnnnnnnnnnnnnnnnnnnnnnnnnnnnnnnnnnnnnnnnnnnnnnnnnnnnnnnnnnnnnnnnnnnnnnnnnnnnnnnnnnnnnnnnnnnnnnnnnnnnnnnnnnnnnnnnnnnnnnnnnnnnnnnnnnnnnnnnnnnnnnnnnnnnnnnnnnnnnnnnnnnnnnnnnnnnnnnnnnnnnnnnnnnnnnnnnnnnnnnnnnnnnnnnnnnnnnnnnnnnnnnnnnnnnnnnnnnnnnnnnnnnnnnnnnnnnnnnnnnnnnnnnnnnnnnnnnnnnnnnnnnnnnnnnnnnnnnnnnnnnnnnnnnnnnnnnnnnnnnnnnnnnnnnnnnnnnnnnnnnnnnnnnnnnnnnnnnnnnnnnnnnnnnnnnnnnnnnnnnnnnnnnnnnnnnnnnnnnnnnnnnnnnnnnnnnnnnnnnnnnnnnnnnnnnnnnnnnnnnnnnnnnnnnnnnnnnnnnnnnnnnnnnnnnnnnnnnnnnnnnnnnnnnnnnnnnnnnnnnnnnnnnnnnnnnnnnnnnnnnnnnnnnnnnnnnnnnnnnnnnnnnnnnnnnnnnnnnnnnnnnnnnnnnnnnnnnnnnnnnnnnnnnnnnnnnnnnnnnnnnnnnnnnnnnnnnnnnnnnnnnnnnnnnnnnnnnnnnnnnnnnnnnnnnnnnnnnnnnnnnnnnnnnnnnnnnnnnnnnnnnnnnnnnnnnnnnnnnnnnnnnnnnnnnnnnnnnnnnnnnnnnnnnnnnnnnnnnnnnnnnnnnnnnnnnnnnnnnnnnnnnnnnnnnnnnnnnnnnnnnnnnnnnnnnnnnnnnnnnnnnnnnnnnnnnnnnnnnnnnnnnnnnnnnnnnnnnnnnnnnnnnnnnnnnnnnnnnnnnnnnnnnnnnnnnnnnnnnnnnnnnnnnnnnnnnnnnnnnnnnnnnnnnnnnnnnnnnnnnnnnnnnnnnnnnnnnnnnnnnnnnnnnnnnnnnnnnnnnnnnnnnnnnnnnnnnnnnnnnnnnnnnnnnnnnnnnnnnnnnnnnnnnnnnnnnnnnnnnnnnnnnnnnnnnnnnnnnnnnnnnnnnnnnnnnnnnnnnnnnnnnnnnnnnnnnnnnnnnnnnnnnnnnnnnnnnnnnnnnnnnnnnnnnnnnnnnnnnnnnnnnnnnnnnnnnnnnnnnnnnnnnnnnnnnnnnnnnnnnnnnnnnnnnnnnnnnnnnnnnnnnnnnnnnnnnnnnnnnnnnnnnnnnnnnnnnnnnnnnnnnnnnnnnnnnnnnnnnnnnnnnnnnnnnnnnnnnnnnnnnnnnnnnnnnnnnnnnnnnnnnnnnnnnnnnnnnnnnnnnnnnnnnnnnnnnnnnnnnnnnnnnnnnnnnnnnnnnnnnnnnnnnnnnnnnnnnnnnnnnnnnnnnnnnnnnnnnnnnnnnnnnnnnnnnnnnnnnnnnnnnnnnnnnnnnnnnnnnnnnnnnnnnnnnnnnnnnnnnnnnnnnnnnnnnnnnnnnnnnnnnnnnnnnnnnnnnnnnnnnnnnnnnnnnnnnnnnnnnnnnnnnnnnnnnnnnnnnnnnnnnnnnnnnnnnnnnnnnnnnnnnnnnnnnnnnnnnnnnnnnnnnnnnnnnnnnnnnnnnnnnnnnnnnnnnnnnnnnnnnnnnnnnnnnnnnnnnnnnnnnnnnnnnnnnnnnnnnnnnnnnnnnnnnnnnnnnnnnnnnnnnnnnnnnnnnnnnnnnnnnnnnnnnnnnnnnnnnnnnnnnnnnnnnnnnnnnnnnnnnnnnnnnnnnnnnnnnnnnnnnnnnnnnnnnnnnnnnnnnnnnnnnnnnnnnnnnnnnnnnnnnnnnnnnnnnnnnnnnnnnnnnnnnnnnnnnnnnnnnnnnnnnnnnnnnnnnnnnnnnnnnnnnnnnnnnnnnnnnnnnnnnnnnnnnnnnnnnnnnnnnnnnnnnnnnnnnnnnnnnnnnnnnnnnnnnnnnnnnnnnnnnnnnnnnnnnnnnnnnnnnnnnnnnnnnnnnnnnnnnnnnnnnnnnnnnnnnnnnnnnnnnnnnnnnnnnnnnnnnnnnnnnnnnnnnnnnnnnnnnnnnnnnnnnnnnnnnnnnnnnnnnnnnnnnnnnnnnnnnnnnnnnnnnnnnnnnnnnnnnnnnnnnnnnnnnnnnnnnnnnnnnnnnnnnnnnnnnnnnnnnnnnnnnnnnnnnnnnnnnnnnnnnnnnnnnnnnnnnnnnnnnnnnnnnnnnnnnnnnnnnnnnnnnnnnnnnnnnnnnnnnnnnnnnnnnnnnnnnnnnnnnnnnnnnnnnnnnnnnnnnnnnnnnnnnnnnnnnnnnnnnnnnnnnnnnnnnnnnnnnnnnnnnnnnnnnnnnnnnnnnnnnnnnnnnnnnnnnnnnnnnnnnnnnnnnnnnnnnnnnnnnnnnnnnnnnnnnnnnnnnnnnnnnnnnnnnnnnnnnnnnnnnnnnnnnnnnnnnnnnnnnnnnnnnnnnnnnnnnnnnnnnnnnnnnnnnnnnnnnnnnnnnnnnnnnnnnnnnnnnnnnnnnnnnnnnnnnnnnnnnnnnnnnnnnnnnnnnnnnnnnnnnnnnnnnnnnnnnnnnnnnnnnnnnnnnnnnnnnnnnnnnnnnnnnnnnnnnnnnnnnnnnnnnnnnnnnnnnnnnnnnnnnnnnnnnnnnnnnnnnnnnnnnnnnnnnnnnnnnnnnnnnnnnnnnnnnnnnnnnnnnnnnnnnnnnnnnnnnnnnnnnnnnnnnnnnnnnnnnnnnnnnnnnnnnnnnnnnnnnnnnnnnnnnnnnnnnnnnnnnnnnnnnnnnnnnnnnnnnnnnnnnnnnnnnnnnnnnnnnnnnnnnnnnnnnnnnnnnnnnnnnnnnnnnnnnnnnnnnnnnnnnnnnnnnnnnnnnnnnnnnnnnnnnnnnnnnnnnnnnnnnnnnnnnnnnnnnnnnnnnnnnnnnnnnnnnnnnnnnnnnnnnnnnnnnnnnnnnnnnnnnnnnnnnnnnnnnnnnnnnnnnnnnnnnnnnnnnnnnnnnnnnnnnnnnnnnnnnnnnnnnnnnnnnnnnnnnnnnnnnnnnnnnnnnnnnnnnnnnnnnnnnnnnnnnnnnnnnnnnnnnnnnnnnnnnnnnnnnnnnnnnnnnnnnnnnnnnnnnnnnnnnnnnnnnnnnnnnnnnnnnnnnnnnnnnnnnnnnnnnnnnnnnnnnnnnnnnnnnnnnnnnnnnnnnnnnnnnnnnnnnnnnnnnnnnnnnnnnnnnnnnnnnnnnnnnnnnnnnnnnnnnnnnnnnnnnnnnnnnnnnnnnnnnnnnnnnnnnnnnnnnnnnnnnnnnnnnnnnnnnnnnnnnnnnnnnnnnnnnnnnnnnnnnnnnnnnnnnnnnnnnnnnnnnnnnnnnnnnnnnnnnnnnnnnnnnnnnnnnnnnnnnnnnnnnnnnnnnnnnnnnnnnnnnnnnnnnnnnnnnnnnnnnnnnnnnnnnnnnnnnnnnnnnnnnnnnnnnnnnnnnnnnnnnnnnnnnnnnnnnnnnnnnnnnnnnnnnnnnnnnnnnnnnnnnnnnnnnnnnnnnnnnnnnnnnnnnnnnnnnnnnnnnnnnnnnnnnnnnnnnnnnnnnnnnnnnnnnnnnnnnnnnnnnnnnnnnnnnnnnnnnnnnnnnnnnnnnnnnnnnnnnnnnnnnnnnnnnnnnnnnnnnnnnnnnnnnnnnnnnnnnnnnnnnnnnnnnnnnnnnnnnnnnnnnnnnnnnnnnnnnnnnnnnnnnnnnnnnnnnnnnnnnnnnnnnnnnnnnnnnnnnnnnnnnnnnnnnnnnnnnnnnnnnnnnnnnnnnnnnnnnnnnnnnnnnnnnnnnnnnnnnnnnnnnnnnnnnnnnnnnnnnnnnnnnnnnnnnnnnnnnnnnnnnnnnnnnnnnnnnnnnnnnnnnnnnnnnnnnnnnnnnnnnnnnnnnnnnnnnnnnnnnnnnnnnnnnnnnnnnnnnnnnnnnnnnnnnnnnnnnnnnnnnnnnnnnnnnnnnnnnnnnnnnnnnnnnnnnnnnnnnnnnnnnnnnnnnnnnnnnnnnnnnnnnnnnnnnnnnnnnnnnnnnnnnnnnnnnnnnnnnnnnnnnnnnnnnnnnnnnnnnnnnnnnnnnnnnnnnnnnnnnnnnnnnnnnnnnnnnnnnnnnnnnnnnnnnnnnnnnnnnnnnnnnnnnnnnnnnnnnnnnnnnnnnnnnnnnnnnnnnnnnnnnnnnnnnnnnnnnnnnnnnnnnnnnnnnnnnnnnnnnnnnnnnnnnnnnnnnnnnnnnnnnnnnnnnnnnnnnnnnnnnnnnnnnnnnnnnnnnnnnnnnnnnnnnnnnnnnnnnnnnnnnnnnnnnnnnnnnnnnnnnnnnnnnnnnnnnnnnnnnnnnnnnnnnnnnnnnnnnnnnnnnnnnnnnnnnnnnnnnnnnnnnnnnnnnnnnnnnnnnnnnnnnnnnnnnnnnnnnnnnnnnnnnnnnnnnnnnnnnnnnnnnnnnnnnnnnnnnnnnnnnnnnnnnnnnnnnnnnnnnnnnnnnnnnnnnnnnnnnnnnnnnnnnnnnnnnnnnnnnnnnnnnnnnnnnnnnnnnnnnnnnnnnnnnnnnnnnnnnnnnnnnnnnnnnnnnnnnnnnnnnnnnnnnnnnnnnnnnnnnnnnnnnnnnnnnnnnnnnnnnnnnnnnnnnnnnnnnnnnnnnnnnnnnnnnnnnnnnnnnnnnnnnnnnnnnnnnnnnnnnnnnnnnnnnnnnnnnnnnnnnnnnnnnnnnnnnnnnnnnnnnnnnnnnnnnnnnnnnnnnnnnnnnnnnnnnnnnnnnnnnnnnnnnnnnnnnnnnnnnnnnnnnnnnnnnnnnnnnnnnnnnnnnnnnnnnnnnnnnnnnnnnnnnnnnnnnnnnnnnnnnnnnnnnnnnnnnnnnnnnnnnnnnnnnnnnnnnnnnnnnnnnnnnnnnnnnnnnnnnnnnnnnnnnnnnnnnnnnnnnnnnnnnnnnnnnnnnnnnnnnnnnnnnnnnnnnnnnnnnnnnnnnnnnnnnnnnnnnnnnnnnnnnnnnnnnnnnnnnnnnnnnnnnnnnnnnnnnnnnnnnnnnnnnnnnnnnnnnnnnnnnnnnnnnnnnnnnnnnnnnnnnnnnnnnnnnnnnnnnnnnnnnnnnnnnnnnnnnnnnnnnnnnnnnnnnnnnnnnnnnnnnnnnnnnnnnnnnnnnnnnnnnnnnnnnnnnnnnnnnnnnnnnnnnnnnnnnnnnnnnnnnnnnnnnnnnnnnnnnnnnnnnnnnnnnnnnnnnnnnnnnnnnnnnnnnnnnnnnnnnnnnnnnnnnnnnnnnnnnnnnnnnnnnnnnnnnnnnnnnnnnnnnnnnnnnnnnnnnnnnnnnnnnnnnnnnnnnnnnnnnnnnnnnnnnnnnnnnnnnnnnnnnnnnnnnnnnnnnnnnnnnnnnnnnnnnnnnnnnnnnnnnnnnnnnnnnnnnnnnnnnnnnnnnnnnnnnnnnnnnnnnnnnnnnnnnnnnnnnnnnnnnnnnnnnnnnnnnnnnnnnnnnnnnnnnnnnnnnnnnnnnnnnnnnnnnnnnnnnnnnnnnnnnnnnnnnnnnnnnnnnnnnnnnnnnnnnnnnnnnnnnnnnnnnnnnnnnnnnnnnnnnnnnnnnnnnnnnnnnnnnnnnnnnnnnnnnnnnnnnnnnnnnnnnnnnnnnnnnnnnnnnnnnnnnnnnnnnnnnnnnnnnnnnnnnnnnnnnnnnnnnnnnnnnnnnnnnnnnnnnnnnnnnnnnnnnnnnnnnnnnnnnnnnnnnnnnnnnnnnnnnnnnnnnnnnnnnnnnnnnnnnnnnnnnnnnnnnnnnnnnnnnnnnnnnnnnnnnnnnnnnnnnnnnnnnnnnnnnnnnnnnnnnnnnnnnnnnnnnnnnnnnnnnnnnnnnnnnnnnnnnnnnnnnnnnnnnnnnnnnnnnnnnnnnnnnnnnnnnnnnnnnnnnnnnnnnnnnnnnnnnnnnnnnnnnnnnnnnnnnnnnnnnnnnnnnnnnnnnnnnnnnnnnnnnnnnnnnnnnnnnnnnnnnnnnnnnnnnnnnnnnnnnnnnnnnnnnnnnnnnnnnnnnnnnnnnnnnnnnnnnnnnnnnnnnnnnnnnnnnnnnnnnnnnnnnnnnnnnnnnnnnnnnnnnnnnnnnnnnnnnnnnnnnnnnnnnnnnnnnnnnnnnnnnnnnnnnnnnnnnnnnnnnnnnnnnnnnnnnnnnnnnnnnnnnnnnnnnnnnnnnnnnnnnnnnnnnnnnnnnnnnnnnnnnnnnnnnnnnnnnnnnnnnnnnnnnnnnnnnnnnnnnnnnnnnnnnnnnnnnnnnnnnnnnnnnnnnnnnnnnnnnnnnnnnnnnnnnnnnnnnnnnnnnnnnnnnnnnnnnnnnnnnnnnnnnnnnnnnnnnnnnnnnnnnnnnnnnnnnnnnnnnnnnnnnnnnnnnnnnnnnnnnnnnnnnnnnnnnnnnnnnnnnnnnnnnnnnnnnnnnnnnnnnnnnnnnnnnnnnnnnnnnnnnnnnnnnnnnnnnnnnnnnnnnnnnnnnnnnnnnnnnnnnnnnnnnnnnnnnnnnnnnnnnnnnnnnnnnnnnnnnnnnnnnnnnnnnnnnnnnnnnnnnnnnnnnnnnnnnnnnnnnnnnnnnnnnnnnnnnnnnnnnnnnnnnnnnnnnnnnnnnnnnnnnnnnnnnnnnnnnnnnnnnnnnnnnnnnnnnnnnnnnnnnnnnnnnnnnnnnnnnnnnnnnnnnnnnnnnnnnnnnnnnnnnnnnnnnnnnnnnnnnnnnnnnnnnnnnnnnnnnnnnnnnnnnnnnnnnnnnnnnnnnnnnnnnnnnnnnnnnnnnnnnnnnnnnnnnnnnnnnnnnnnnnnnnnnnnnnnnnnnnnnnnnnnnnnnnnnnnnnnnnnnnnnnnnnnnnnnnnnnnnnnnnnnnnnnnnnnnnnnnnnnnnnnnnnnnnnnnnnnnnnnnnnnnnnnnnnnnnnnnnnnnnnnnnnnnnnnnnnnnnnnnnnnnnnnnnnnnnnnnnnnnnnnnnnnnnnnnnnnnnnnnnnnnnnnnnnnnnnnnnnnnnnnnnnnnnnnnnnnnnnnnnnnnnnnnnnnnnnnnnnnnnnnnnnnnnnnnnnnnnnnnnnnnnnnnnnnnnnnnnnnnnnnnnnnnnnnnnnnnnnnnnnnnnnnnnnnnnnnnnnnnnnnnnnnnnnnnnnnnnnnnnnnnnnnnnnnnnnnnnnnnnnnnnnnnnnnnnnnnnnnnnnnnnnnnnnnnnnnnnnnnnnnnnnnnnnnnnnnnnnnnnnnnnnnnnnnnnnnnnnnnnnnnnnnnnnnnnnnnnnnnnnnnnnnnnnnnnnnnnnnnnnnnnnnnnnnnnnnnnnnnnnnnnnnnnnnnnnnnnnnnnnnnnnnnnnnnnnnnnnnnnnnnnnnnnnnnnnnnnnnnnnnnnnnnnnnnnnnnnnnnnnnnnnnnnnnnnnnnnnnnnnnnnnnnnnnnnnnnnnnnnnnnnnnnnnnnnnnnnnnnnnnnnnnnnnnnnnnnnnnnnnnnnnnnnnnnnnnnnnnnnnnnnnnnnnnnnnnnnnnnnnnnnnnnnnnnnnnnnnnnnnnnnnnnnnnnnnnnnnnnnnnnnnnnnnnnnnnnnnnnnnnnnnnnnnnnnnnnnnnnnnnnnnnnnnnnnnnnnnnnnnnnnnnnnnnnnnnnnnnnnnnnnnnnnnnnnnnnnnnnnnnnnnnnnnnnnnnnnnnnnnnnnnnnnnnnnnnnnnnnnnnnnnnnnnnnnnnnnnnnnnnnnnnnnnnnnnnnnnnnnnnnnnnnnnnnnnnnnnnnnnnnnnnnnnnnnnnnnnnnnnnnnnnnnnnnnnnnnnnnnnnnnnnnnnnnnnnnnnnnnnnnnnnnnnnnnnnnnnnnnnnnnnnnnnnnnnnnnnnnnnnnnnnnnnnnnnnnnnnnnnnnnnnnnnnnnnnnnnnnnnnnnnnnnnnnnnnnnnnnnnnnnnnnnnnnnnnnnnnnnnnnnnnnnnnnnnnnnnnnnnnnnnnnnnnnnnnnnnnnnnnnnnnnnnnnnnnnnnnnnnnnnnnnnnnnnnnnnnnnnnnnnnnnnnnnnnnnnnnnnnnnnnnnnnnnnnnnnnnnnnnnnnnnnnnnnnnnnnnnnnnnnnnnnnnnnnnnnnnnnnnnnnnnnnnnnnnnnnnnnnnnnnnnnnnnnnnnnnnnnnnnnnnnnnnnnnnnnnnnnnnnnnnnnnnnnnnnnnnnnnnnnnnnnnnnnnnnnnnnnnnnnnnnnnnnnnnnnnnnnnnnnnnnnnnnnnnnnnnnnnnnnnnnnnnnnnnnnnnnnnnnnnnnnnnnnnnnnnnnnnnnnnnnnnnnnnnnnnnnnnnnnnnnnnnnnnnnnnnnnnnnnnnnnnnnnnnnnnnnnnnnnnnnnnnnnnnnnnnnnnnnnnnnnnnnnnnnnnnnnnnnnnnnnnnnnnnnnnnnnnnnnnnnnnnnnnnnnnnnnnnnnnnnnnnnnnnnnnnnnnnnnnnnnnnnnnnnnnnnnnnnnnnnnnnnnnnnnnnnnnnnnnnnnnnnnnnnnnnnnnnnnnnnnnnnnnnnnnnnnnnnnnnnnnnnnnnnnnnnnnnnnnnnnnnnnnnnnnnnnnnnnnnnnnnnnnnnnnnnnnnnnnnnnnnnnnnnnnnnnnnnnnnnnnnnnnnnnnnnnnnnnnnnnnnnnnnnnnnnnnnnnnnnnnnnnnnnnnnnnnnnnnnnnnnnnnnnnnnnnnnnnnnnnnnnnnnnnnnnnnnnnnnnnnnnnnnnnnnnnnnnnnnnnnnnnnnnnnnnnnnnnnnnnnnnnnnnnnnnnnnnnnnnnnnnnnnnnnnnnnnnnnnnnnnnnnnnnnnnnnnnnnnnnnnnnnnnnnnnnnnnnnnnnnnnnnnnnnnnnnnnnnnnnnnnnnnnnnnnnnnnnnnnnnnnnnnnnnnnnnnnnnnnnnnnnnnnnnnnnnnnnnnnnnnnnnnnnnnnnnnnnnnnnnnnnnnnnnnnnnnnnnnnnnnnnnnnnnnnnnnnnnnnnnnnnnnnnnnnnnnnnnnnnnnnnnnnnnnnnnnnnnnnnnnnnnnnnnnnnnnnnnnnnnnnnnnnnnnnnnnnnnnnnnnnnnnnnnnnnnnnnnnnnnnnnnnnnnnnnnnnnnnnnnnnnnnnnnnnnnnnnnnnnnnnnnnnnnnnnnnnnnnnnnnnnnnnnnnnnnnnnnnnnnnnnnnnnnnnnnnnnnnnnnnnnnnnnnnnnnnnnnnnnnnnnnnnnnnnnnnnnnnnnnnnnnnnnnnnnnnnnnnnnnnnnnnnnnnnnnnnnnnnnnnnnnnnnnnnnnnnnnnnnnnnnnnnnnnnnnnnnnnnnnnnnnnnnnnnnnnnnnnnnnnnnnnnnnnnnnnnnnnnnnnnnnnnnnnnnnnnnnnnnnnnnnnnnnnnnnnnnnnnnnnnnnnnnnnnnnnnnnnnnnnnnnnnnnnnnnnnnnnnnnnnnnnnnnnnnnnnnnnnnnnnnnnnnnnnnnnnnnnnnnnnnnnnnnnnnnnnnnnnnnnnnnnnnnnnnnnnnnnnnnnnnnnnnnnnnnnnnnnnnnnnnnnnnnnnnnnnnnnnnnnnnnnnnnnnnnnnnnnnnnnnnnnnnnnnnnnnnnnnnnnnnnnnnnnnnnnnnnnnnnnnnnnnnnnnnnnnnnnnnnnnnnnnnnnnnnnnnnnnnnnnnnnnnnnnnnnnnnnnnnnnnnnnnnnnnnnnnnnnnnnnnnnnnnnnnnnnnnnnnnnnnnnnnnnnnnnnnnnnnnnnnnnnnnnnnnnnnnnnnnnnnnnnnnnnnnnnnnnnnnnnnnnnnnnnnnnnnnnnnnnnnnnnnnnnnnnnnnnnnnnnnnnnnnnnnnnnnnnnnnnnnnnnnnnnnnnnnnnnnnnnnnnnnnnnnnnnnnnnnnnnnnnnnnnnnnnnnnnnnnnnnnnnnnnnnnnnnnnnnnnnnnnnnnnnnnnnnnnnnnnnnnnnnnnnnnnnnnnnnnnnnnnnnnnnnnnnnnnnnnnnnnnnnnnnnnnnnnnnnnnnnnnnnnnnnnnnnnnnnnnnnnnnnnnnnnnnnnnnnnnnnnnnnnnnnnnnnnnnnnnnnnnnnnnnnnnnnnnnnnnnnnnnnnnnnnnnnnnnnnnnnnnnnnnnnnnnnnnnnnnnnnnnnnnnnnnnnnnnnnnnnnnnnnnnnnnnnnnnnnnnnnnnnnnnnnnnnnnnnnnnnnnnnnnnnnnnnnnnnnnnnnnnnnnnnnnnnnnnnnnnnnnnnnnnnnnnnnnnnnnnnnnnnnnnnnnnnnnnnnnnnnnnnnnnnnnnnnnnnnnnnnnnnnnnnnnnnnnnnnnnnnnnnnnnnnnnnnnnnnnnnnnnnnnnnnnnnnnnnnnnnnnnnnnnnnnnnnnnnnnnnnnnnnnnnnnnnnnnnnnnnnnnnnnnnnnnnnnnnnnnnnnnnnnnnnnnnnnnnnnnnnnnnnnnnnnnnnnnnnnnnnnnnnnnnnnnnnnnnnnnnnnnnnnnnnnnnnnnnnnnnnnnnnnnnnnnnnnnnnnnnnnnnnnnnnnnnnnnnnnnnnnnnnnnnnnnnnnnnnnnnnnnnnnnnnnnnnnnnnnnnnnnnnnnnnnnnnnnnnnnnnnnnnnnnnnnnnnnnnnnnnnnnnnnnnnnnnnnnnnnnnnnnnnnnnnnnnnnnnnnnnnnnnnnnnnnnnnnnnnnnnnnnnnnnnnnnnnnnnnnnnnnnnnnnnnnnnnnnnnnnnnnnnnnnnnnnnnnnnnnnnnnnnnnnnnnnnnnnnnnnnnnnnnnnnnnnnnnnnnnnnnnnnnnnnnnnnnnnnnnnnnnnnnnnnnnnnnnnnnnnnnnnnnnnnnnnnnnnnnnnnnnnnnnnnnnnnnnnnnnnnnnnnnnnnnnnnnnnnnnnnnnnnnnnnnnnnnnnnnnnnnnnnnnnnnnnnnnnnnnnnnnnnnnnnnnnnnnnnnnnnnnnnnnnnnnnnnnnnnnnnnnnnnnnnnnnnnnnnnnnnnnnnnnnnnnnnnnnnnnnnnnnnnnnnnnnnnnnnnnnnnnnnnnnnnnnnnnnnnnnnnnnnnnnnnnnnnnnnnnnnnnnnnnnnnnnnnnnnnnnnnnnnnnnnnnnnnnnnnnnnnnnnnnnnnnnnnnnnnnnnnnnnnnnnnnnnnnnnnnnnnnnnnnnnnnnnnnnnnnnnnnnnnnnnnnnnnnnnnnnnnnnnnnnnnnnnnnnnnnnnnnnnnnnnnnnnnnnnnnnnnnnnnnnnnnnnnnnnnnnnnnnnnnnnnnnnnnnnnnnnnnnnnnnnnnnnnnnnnnnnnnnnnnnnnnnnnnnnnnnnnnnnnnnnnnnnnnnnnnnnnnnnnnnnnnnnnnnnnnnnnnnnnnnnnnnnnnnnnnnnnnnnnnnnnnnnnnnnnnnnnnnnnnnnnnnnnnnnnnnnnnnnnnnnnnnnnnnnnnnnnnnnnnnnnnnnnnnnnnnnnnnnnnnnnnnnnnnnnnnnnnnnnnnnnnnnnnnnnnnnnnnnnnnnnnnnnnnnnnnnnnnnnnnnnnnnnnnnnnnnnnnnnnnnnnnnnnnnnnnnnnnnnnnnnnnnnnnnnnnnnnnnnnnnnnnnnnnnnnnnnnnnnnnnnnnnnnnnnnnnnnnnnnnnnnnnnnnnnnnnnnnnnnnnnnnnnnnnnnnnnnnnnnnnnnnnnnnnnnnnnnnnnnnnnnnnnnnnnnnnnnnnnnnnnnnnnnnnnnnnnnnnnnnnnnnnnnnnnnnnnnnnnnnnnnnnnnnnnnnnnnnnnnnnnnnnnnnnnnnnnnnnnnnnnnnnnnnnnnnnnnnnnnnnnnnnnnnnnnnnnnnnnnnnnnnnnnnnnnnnnnnnnnnnnnnnnnnnnnnnnnnnnnnnnnnnnnnnnnnnnnnnnnnnnnnnnnnnnnnnnnnnnnnnnnnnnnnnnnnnnnnnnnnnnnnnnnnnnnnnnnnnnnnnnnnnnnnnnnnnnnnnnnnnnnnnnnnnnnnnnnnnnnnnnnnnnnnnnnnnnnnnnnnnnnnnnnnnnnnnnnnnnnnnnnnnnnnnnnnnnnnnnnnnnnnnnnnnnnnnnnnnnnnnnnnnnnnnnnnnnnnnnnnnnnnnnnnnnnnnnnnnnnnnnnnnnnnnnnnnnnnnnnnnnnnnnnnnnnnnnnnnnnnnnnnnnnnnnnnnnnnnnnnnnnnnnnnnnnnnnnnnnnnnnnnnnnnnnnnnnnnnnnnnnnnnnnnnnnnnnnnnnnnnnnnnnnnnnnnnnnnnnnnnnnnnnnnnnnnnnnnnnnnnnnnnnnnnnnnnnnnnnnnnnnnnnnnnnnnnnnnnnnnnnnnnnnnnnnnnnnnnnnnnnnnnnnnnnnnnnnnnnnnnnnnnnnnnnnnnnnnnnnnnnnnnnnnnnnnnnnnnnnnnnnnnnnnnnnnnnnnnnnnnnnnnnnnnnnnnnnnnnnnnnnnnnnnnnnnnnnnnnnnnnnnnnnnnnnnnnnnnnnnnnnnnnnnnnnnnnnnnnnnnnnnnnnnnnnnnnnnnnnnnnnnnnnnnnnnnnnnnnnnnnnnnnnnnnnnnnnnnnnnnnnnnnnnnnnnnnnnnnnnnnnnnnnnnnnnnnnnnnnnnnnnnnnnnnnnnnnnnnnnnnnnnnnnnnnnnnnnnnnnnnnnnnnnnnnnnnnnnnnnnnnnnnnnnnnnnnnnnnnnnnnnnnnnnnnnnnnnnnnnnnnnnnnnnnnnnnnnnnnnnnnnnnnnnnnnnnnnnnnnnnnnnnnnnnnnnnnnnnnnnnnnnnnnnnnnnnnnnnnnnnnnnnnnnnnnnnnnnnnnnnnnnnnnnnnnnnnnnnnnnnnnnnnnnnnnnnnnnnnnnnnnnnnnnnnnnnnnnnnnnnnnnnnnnnnnnnnnnnnnnnnnnnnnnnnnnnnnnnnnnnnnnnnnnnnnnnnnnnnnnnnnnnnnnnnnnnnnnnnnnnnnnnnnnnnnnnnnnnnnnnnnnnnnnnnnnnnnnnnnnnnnnnnnnnnnnnnnnnnnnnnnnnnnnnnnnnnnnnnnnnnnnnnnnnnnnnnnnnnnnnnnnnnnnnnnnnnnnnnnnnnnnnnnnnnnnnnnnnnnnnnnnnnnnnnnnnnnnnnnnnnnnnnnnnnnnnnnnnnnnnnnnnnnnnnnnnnnnnnnnnnnnnnnnnnnnnnnnnnnnnnnnnnnnnnnnnnnnnnnnnnnnnnnnnnnnnnnnnnnnnnnnnnnnnnnnnnnnnnnnnnnnnnnnnnnnnnnnnnnnnnnnnnnnnnnnnnnnnnnnnnnnnnnnnnnnnnnnnnnnnnnnnnnnnnnnnnnnnnnnnnnnnnnnnnnnnnnnnnnnnnnnnnnnnnnnnnnnnnnnnnnnnnnnnnnnnnnnnnnnnnnnnnnnnnnnnnnnnnnnnnnnnnnnnnnnnnnnnnnnnnnnnnnnnnnnnnnnnnnnnnnnnnnnnnnnnnnnnnnnnnnnnnnnnnnnnnnnnnnnnnnnnnnnnnnnnnnnnnnnnnnnnnnnnnnnnnnnnnnnnnnnnnnnnnnnnnnnnnnnnnnnnnnnnnnnnnnnnnnnnnnnnnnnnnnnnnnnnnnnnnnnnnnnnnnnnnnnnnnnnnnnnnnnnnnnnnnnnnnnnnnnnnnnnnnnnnnnnnnnnnnnnnnnnnnnnnnnnnnnnnnnnnnnnnnnnnnnnnnnnnnnnnnnnnnnnnnnnnnnnnnnnnnnnnnnnnnnnnnnnnnnnnnnnnnnnnnnnnnnnnnnnnnnnnnnnnnnnnnnnnnnnnnnnnnnnnnnnnnnnnnnnnnnnnnnnnnnnnnnnnnnnnnnnnnnnnnnnnnnnnnnnnnnnnnnnnnnnnnnnnnnnnnnnnnnnnnnnnnnnnnnnnnnnnnnnnnnnnnnnnnnnnnnnnnnnnnnnnnnnnnnnnnnnnnnnnnnnnnnnnnnnnnnnnnnnnnnnnnnnnnnnnnnnnnnnnnnnnnnnnnnnnnnnnnnnnnnnnnnnnnnnnnnnnnnnnnnnnnnnnnnnnnnnnnnnnnnnnnnnnnnnnnnnnnnnnnnnnnnnnnnnnnnnnnnnnnnnnnnnnnnnnnnnnnnnnnnnnnnnnnnnnnnnnnnnnnnnnnnnnnnnnnnnnnnnnnnnnnnnnnnnnnnnnnnnnnnnnnnnnnnnnnnnnnnnnnnnnnnnnnnnnnnnnnnnnnnnnnnnnnnnnnnnnnnnnnnnnnnnnnnnnnnnnnnnnnnnnnnnnnnnnnnnnnnnnnnnnnnnnnnnnnnnnnnnnnnnnnnnnnnnnnnnnnnnnnnnnnnnnnnnnnnnnnnnnnnnnnnnnnnnnnnnnnnnnnnnnnnnnnnnnnnnnnnnnnnnnnnnnnnnnnnnnnnnnnnnnnnnnnnnnnnnnnnnnnnnnnnnnnnnnnnnnnnnnnnnnnnnnnnnnnnnnnnnnnnnnnnnnnnnnnnnnnnnnnnnnnnnnnnnnnnnnnnnnnnnnnnnnnnnnnnnnnnnnnnnnnnnnnnnnnnnnnnnnnnnnnnnnnnnnnnnnnnnnnnnnnnnnnnnnnnnnnnnnnnnnnnnnnnnnnnnnnnnnnnnnnnnnnnnnnnnnnnnnnnnnnnnnnnnnnnnnnnnnnnnnnnnnnnnnnnnnnnnnnnnnnnnnnnnnnnnnnnnnnnnnnnnnnnnnnnnnnnnnnnnnnnnnnnnnnnnnnnnnnnnnnnnnnnnnnnnnnnnnnnnnnnnnnnnnnnnnnnnnnnnnnnnnnnnnnnnnnnnnnnnnnnnnnnnnnnnnnnnnnnnnnnnnnnnnnnnnnnnnnnnnnnnnnnnnnnnnnnnnnnnnnnnnnnnnnnnnnnnnnnnnnnnnnnnnnnnnnnnnnnnnnnnnnnnnnnnnnnnnnnnnnnnnnnnnnnnnnnnnnnnnnnnnnnnnnnnnnnnnnnnnnnnnnnnnnnnnnnnnnnnnnnnnnnnnnnnnnnnnnnnnnnnnnnnnnnnnnnnnnnnnnnnnnnnnnnnnnnnnnnnnnnnnnnnnnnnnnnnnnnnnnnnnnnnnnnnnnnnnnnnnnnnnnnnnnnnnnnnnnnnnnnnnnnnnnnnnnnnnnnnnnnnnnnnnnnnnnnnnnnnnnnnnnnnnnnnnnnnnnnnnnnnnnnnnnnnnnnnnnnnnnnnnnnnnnnnnnnnnnnnnnnnnnnnnnnnnnnnnnnnnnnnnnnnnnnnnnnnnnnnnnnnnnnnnnnnnnnnnnnnnnnnnnnnnnnnnnnnnnnnnnnnnnnnnnnnnnnnnnnnnnnnnnnnnnnnnnnnnnnnnnnnnnnnnnnnnnnnnnnnnnnnnnnnnnnnnnnnnnnnnnnnnnnnnnnnnnnnnnnnnnnnnnnnnnnnnnnnnnnnnnnnnnnnnnnnnnnnnnnnnnnnnnnnnnnnnnnnnnnnnnnnnnnnnnnnnnnnnnnnnnnnnnnnnnnnnnnnnnnnnnnnnnnnnnnnnnnnnnnnnnnnnnnnnnnnnnnnnnnnnnnnnnnnnnnnnnnnnnnnnnnnnnnnnnnnnnnnnnnnnnnnnnnnnnnnnnnnnnnnnnnnnnnnnnnnnnnnnnnnnnnnnnnnnnnnnnnnnnnnnnnnnnnnnnnnnnnnnnnnnnnnnnnnnnnnnnnnnnnnnnnnnnnnnnnnnnnnnnnnnnnnnnnnnnnnnnnnnnnnnnnnnnnnnnnnnnnnnnnnnnnnnnnnnnnnnnnnnnnnnnnnnnnnnnnnnnnnnnnnnnnnnnnnnnnnnnnnnnnnnnnnnnnnnnnnnnnnnnnnnnnnnnnnnnnnnnnnnnnnnnnnnnnnnnnnnnnnnnnnnnnnnnnnnnnnnnnnnnnnnnnnnnnnnnnnnnnnnnnnnnnnnnnnnnnnnnnnnnnnnnnnnnnnnnnnnnnnnnnnnnnnnnnnnnnnnnnnnnnnnnnnnnnnnnnnnnnnnnnnnnnnnnnnnnnnnnnnnnnnnnnnnnnnnnnnnnnnnnnnnnnnnnnnnnnnnnnnnnnnnnnnnnnnnnnnnnnnnnnnnnnnnnnnnnnnnnnnnnnnnnnnnnnnnnnnnnnnnnnnnnnnnnnnnnnnnnnnnnnnnnnnnnnnnnnnnnnnnnnnnnnnnnnnnnnnnnnnnnnnnnnnnnnnnnnnnnnnnnnnnnnnnnnnnnnnnnnnnnnnnnnnnnnnnnnnnnnnnnnnnnnnnnnnnnnnnnnnnnnnnnnnnnnnnnnnnnnnnnnnnnnnnnnnnnnnnnnnnnnnnnnnnnnnnnnnnnnnnnnnnnnnnnnnnnnnnnnnnnnnnnnnnnnnnnnnnnnnnnnnnnnnnnnnnnnnnnnnnnnnnnnnnnnnnnnnnnnnnnnnnnnnnnnnnnnnnnnnnnnnnnnnnnnnnnnnnnnnnnnnnnnnnnnnnnnnnnnnnnnnnnnnnnnnnnnnnnnnnnnnnnnnnnnnnnnnnnnnnnnnnnnnnnnnnnnnnnnnnnnnnnnnnnnnnnnnnnnnnnnnnnnnnnnnnnnnnnnnnnnnnnnnnnnnnnnnnnnnnnnnnnnnnnnnnnnnnnnnnnnnnnnnnnnnnnnnnnnnnnnnnnnnnnnnnnnnnnnnnnnnnnnnnnnnnnnnnnnnnnnnnnnnnnnnnnnnnnnnnnnnnnnnnnnnnnnnnnnnnnnnnnnnnnnnnnnnnnnnnnnnnnnnnnnnnnnnnnnnnnnnnnnnnnnnnnnnnnnnnnnnnnnnnnnnnnnnnnnnnnnnnnnnnnnnnnnnnnnnnnnnnnnnnnnnnnnnnnnnnnnnnnnnnnnnnnnnnnnnnnnnnnnnnnnnnnnnnnnnnnnnnnnnnnnnnnnnnnnnnnnnnnnnnnnnnnnnnnnnnnnnnnnnnnnnnnnnnnnnnnnnnnnnnnnnnnnnnnnnnnnnnnnnnnnnnnnnnnnnnnnnnnnnnnnnnnnnnnnnnnnnnnnnnnnnnnnnnnnnnnnnnnnnnnnnnnnnnnnnnnnnnnnnnnnnnnnnnnnnnnnnnnnnnnnnnnnnnnnnnnnnnnnnnnnnnnnnnnnnnnnnnnnnnnnnnnnnnnnnnnnnnnnnnnnnnnnnnnnnnnnnnnnnnnnnnnnnnnnnnnnnnnnnnnnnnnnnnnnnnnnnnnnnnnnnnnnnnnnnnnnnnnnnnnnnnnnnnnnnnnnnnnnnnnnnnnnnnnnnnnnnnnnnnnnnnnnnnnnnnnnnnnnnnnnnnnnnnnnnnnnnnnnnnnnnnnnnnnnnnnnnnnnnnnnnnnnnnnnnnnnnnnnnnnnnnnnnnnnnnnnnnnnnnnnnnnnnnnnnnnnnnnnnnnnnnnnnnnnnnnnnnnnnnnnnnnnnnnnnnnnnnnnnnnnnnnnnnnnnnnnnnnnnnnnnnnnnnnnnnnnnnnnnnnnnnnnnnnnnnnnnnnnnnnnnnnnnnnnnnnnnnnnnnnnnnnnnnnnnnnnnnnnnnnnnnnnnnnnnnnnnnnnnnnnnnnnnnnnnnnnnnnnnnnnnnnnnnnnnnnnnnnnnnnnnnnnnnnnnnnnnnnnnnnnnnnnnnnnnnnnnnnnnnnnnnnnnnnnnnnnnnnnnnnnnnnnnnnnnnnnnnnnnnnnnnnnnnnnnnnnnnnnnnnnnnnnnnnnnnnnnnnnnnnnnnnnnnnnnnnnnnnnnnnnnnnnnnnnnnnnnnnnnnnnnnnnnnnnnnnnnnnnnnnnnnnnnnnnnnnnnnnnnnnnnnnnnnnnnnnnnnnnnnnnnnnnnnnnnnnnnnnnnnnnnnnnnnnnnnnnnnnnnnnnnnnnnnnnnnnnnnnnnnnnnnnnnnnnnnnnnnnnnnnnnnnnnnnnnnnnnnnnnnnnnnnnnnnnnnnnnnnnnnnnnnnnnnnnnnnnnnnnnnnnnnnnnnnnnnnnnnnnnnnnnnnnnnnnnnnnnnnnnnnnnnnnnnnnnnnnnnnnnnnnnnnnnnnnnnnnnnnnnnnnnnnnnnnnnnnnnnnnnnnnnnnnnnnnnnnnnnnnnnnnnnnnnnnnnnnnnnnnnnnnnnnnnnnnnnnnnnnnnnnnnnnnnnnnnnnnnnnnnnnnnnnnnnnnnnnnnnnnnnnnnnnnnnnnnnnnnnnnnnnnnnnnnnnnnnnnnnnnnnnnnnnnnnnnnnnnnnnnnnnnnnnnnnnnnnnnnnnnnnnnnnnnnnnnnnnnnnnnnnnnnnnnnnnnnnnnnnnnnnnnnnnnnnnnnnnnnnnnnnnnnnnnnnnnnnnnnnnnnnnnnnnnnnnnnnnnnnnnnnnnnnnnnnnnnnnnnnnnnnnnnnnnnnnnnnnnnnnnnnnnnnnnnnnnnnnnnnnnnnnnnnnnnnnnnnnnnnnnnnnnnnnnnnnnnnnnnnnnnnnnnnnnnnnnnnnnnnnnnnnnnnnnnnnnnnnnnnnnnnnnnnnnnnnnnnnnnnnnnnnnnnnnnnnnnnnnnnnnnnnnnnnnnnnnnnnnnnnnnnnnnnnnnnnnnnnnnnnnnnnnnnnnnnnnnnnnnnnnnnnnnnnnnnnnnnnnnnnnnnnnnnnnnnnnnnnnnnnnnnnnnnnnnnnnnnnnnnnnnnnnnnnnnnnnnnnnnnnnnnnnnnnnnnnnnnnnnnnnnnnnnnnnnnnnnnnnnnnnnnnnnnnnnnnnnnnnnnnnnnnnnnnnnnnnnnnnnnnnnnnnnnnnnnnnnnnnnnnnnnnnnnnnnnnnnnnnnnnnnnnnnnnnnnnnnnnnnnnnnnnnnnnnnnnnnnnnnnnnnnnnnnnnnnnnnnnnnnnnnnnnnnnnnnnnnnnnnnnnnnnnnnnnnnnnnnnnnnnnnnnnnnnnnnnnnnnnnnnnnnnnnnnnnnnnnnnnnnnnnnnnnnnnnnnnnnnnnnnnnnnnnnnnnnnnnnnnnnnnnnnnnnnnnnnnnnnnnnnnnnnnnnnnnnnnnnnnnnnnnnnnnnnnnnnnnnnnnnnnnnnnnnnnnnnnnnnnnnnnnnnnnnnnnnnnnnnnnnnnnnnnnnnnnnnnnnnnnnnnnnnnnnnnnnnnnnnnnnnnnnnnnnnnnnnnnnnnnnnnnnnnnnnnnnnnnnnnnnnnnnnnnnnnnnnnnnnnnnnnnnnnnnnnnnnnnnnnnnnnnnnnnnnnnnnnnnnnnnnnnnnnnnnnnnnnnnnnnnnnnnnnnnnnnnnnnnnnnnnnnnnnnnnnnnnnnnnnnnnnnnnnnnnnnnnnnnnnnnnnnnnnnnnnnnnnnnnnnnnnnnnnnnnnnnnnnnnnnnnnnnnnnnnnnnnnnnnnnnnnnnnnnnnnnnnnnnnnnnnnnnnnnnnnnnnnnnnnnnnnnnnnnnnnnnnnnnnnnnnnnnnnnnnnnnnnnnnnnnnnnnnnnnnnnnnnnnnnnnnnnnnnnnnnnnnnnnnnnnnnnnnnnnnnnnnnnnnnnnnnnnnnnnnnnnnnnnnnnnnnnnnnnnnnnnnnnnnnnnnnnnnnnnnnnnnnnnnnnnnnnnnnnnnnnnnnnnnnnnnnnnnnnnnnnnnnnnnnnnnnnnnnnnnnnnnnnnnnnnnnnnnnnnnnnnnnnnnnnnnnnnnnnnnnnnnnnnnnnnnnnnnnnnnnnnnnnnnnnnnnnnnnnnnnnnnnnnnnnnnnnnnnnnnnnnnnnnnnnnnnnnnnnnnnnnnnnnnnnnnnnnnnnnnnnnnnnnnnnnnnnnnnnnnnnnnnnnnnnnnnnnnnnnnnnnnnnnnnnnnnnnnnnnnnnnnnnnnnnnnnnnnnnnnnnnnnnnnnnnnnnnnnnnnnnnnnnnnnnnnnnnnnnnnnnnnnnnnnnnnnnnnnnnnnnnnnnnnnnnnnnnnnnnnnnnnnnnnnnnnnnnnnnnnnnnnnnnnnnnnnnnnnnnnnnnnnnnnnnnnnnnnnnnnnnnnnnnnnnnnnnnnnnnnnnnnnnnnnnnnnnnnnnnnnnnnnnnnnnnnnnnnnnnnnnnnnnnnnnnnnnnnnnnnnnnnnnnnnnnnnnnnnnnnnnnnnnnnnnnnnnnnnnnnnnnnnnnnnnnnnnnnnnnnnnnnnnnnnnnnnnnnnnnnnnnnnnnnnnnnnnnnnnnnnnnnnnnnnnnnnnnnnnnnnnnnnnnnnnnnnnnnnnnnnnnnnnnnnnnnnnnnnnnnnnnnnnnnnnnnnnnnnnnnnnnnnnnnnnnnnnnnnnnnnnnnnnnnnnnnnnnnnnnnnnnnnnnnnnnnnnnnnnnnnnnnnnnnnnnnnnnnnnnnnnnnnnnnnnnnnnnnnnnnnnnnnnnnnnnnnnnnnnnnnnnnnnnnnnnnnnnnnnnnnnnnnnnnnnnnnnnnnnnnnnnnnnnnnnnnnnnnnnnnnnnnnnnnnnnnnnnnnnnnnnnnnnnnnnnnnnnnnnnnnnnnnnnnnnnnnnnnnnnnnnnnnnnnnnnnnnnnnnnnnnnnnnnnnnnnnnnnnnnnnnnnnnnnnnnnnnnnnnnnnnnnnnnnnnnnnnnnnnnnnnnnnnnnnnnnnnnnnnnnnnnnnnnnnnnnnnnnnnnnnnnnnnnnnnnnnnnnnnnnnnnnnnnnnnnnnnnnnnnnnnnnnnnnnnnnnnnnnnnnnnnnnnnnnnnnnnnnnnnnnnnnnnnnnnnnnnnnnnnnnnnnnnnnnnnnnnnnnnnnnnnnnnnnnnnnnnnnnnnnnnnnnnnnnnnnnnnnnnnnnnnnnnnnnnnnnnnnnnnnnnnnnnnnnnnnnnnnnnnnnnnnnnnnnnnnnnnnnnnnnnnnnnnnnnnnnnnnnnnnnnnnnnnnnnnnnnnnnnnnnnnnnnnnnnnnnnnnnnnnnnnnnnnnnnnnnnnnnnnnnnnnnnnnnnnnnnnnnnnnnnnnnnnnnnnnnnnnnnnnnnnnnnnnnnnnnnnnnnnnnnnnnnnnnnnnnnnnnnnnnnnnnnnnnnnnnnnnnnnnnnnnnnnnnnnnnnnnnnnnnnnnnnnnnnnnnnnnnnnnnnnnnnnnnnnnnnnnnnnnnnnnnnnnnnnnnnnnnnnnnnnnnnnnnnnnnnnnnnnnnnnnnnnnnnnnnnnnnnnnnnnnnnnnnnnnnnnnnnnnnnnnnnnnnnnnnnnnnnnnnnnnnnnnnnnnnnnnnnnnnnnnnnnnnnnnnnnnnnnnnnnnnnnnnnnnnnnnnnnnnnnnnnnnnnnnnnnnnnnnnnnnnnnnnnnnnnnnnnnnnnnnnnnnnnnnnnnnnnnnnnnnnnnnnnnnnnnnnnnnnnnnnnnnnnnnnnnnnnnnnnnnnnnnnnnnnnnnnnnnnnnnnnnnnnnnnnnnnnnnnnnnnnnnnnnnnnnnnnnnnnnnnnnnnnnnnnnnnnnnnnnnnnnnnnnnnnnnnnnnnnnnnnnnnnnnnnnnnnnnnnnnnnnnnnnnnnnnnnnnnnnnnnnnnnnnnnnnnnnnnnnnnnnnnnnnnnnnnnnnnnnnnnnnnnnnnnnnnnnnnnnnnnnnnnnnnnnnnnnnnnnnnnnnnnnnnnnnnnnnnnnnnnnnnnnnnnnnnnnnnnnnnnnnnnnnnnnnnnnnnnnnnnnnnnnnnnnnnnnnnnnnnnnnnnnnnnnnnnnnnnnnnnnnnnnnnnnnnnnnnnnnnnnnnnnnnnnnnnnnnnnnnnnnnnnnnnnnnnnnnnnnnnnnnnnnnnnnnnnnnnnnnnnnnnnnnnnnnnnnnnnnnnnnnnnnnnnnnnnnnnnnnnnnnnnnnnnnnnnnnnnnnnnnnnnnnnnnnnnnnnnnnnnnnnnnnnnnnnnnnnnnnnnnnnnnnnnnnnnnnnnnnnnnnnnnnnnnnnnnnnnnnnnnnnnnnnnnnnnnnnnnnnnnnnnnnnnnnnnnnnnnnnnnnnnnnnnnnnnnnnnnnnnnnnnnnnnnnnnnnnnnnnnnnnnnnnnnnnnnnnnnnnnnnnnnnnnnnnnnnnnnnnnnnnnnnnnnnnnnnnnnnnnnnnnnnnnnnnnnnnnnnnnnnnnnnnnnnnnnnnnnnnnnnnnnnnnnnnnnnnnnnnnnnnnnnnnnnnnnnnnnnnnnnnnnnnnnnnnnnnnnnnnnnnnnnnnnnnnnnnnnnnnnnnnnnnnnnnnnnnnnnnnnnnnnnnnnnnnnnnnnnnnnnnnnnnnnnnnnnnnnnnnnnnnnnnnnnnnnnnnnnnnnnnnnnnnnnnnnnnnnnnnnnnnnnnnnnnnnnnnnnnnnnnnnnnnnnnnnnnnnnnnnnnnnnnnnnnnnnnnnnnnnnnnnnnnnnnnnnnnnnnnnnnnnnnnnnnnnnnnnnnnnnnnnnnnnnnnnnnnnnnnnnnnnnnnnnnnnnnnnnnnnnnnnnnnnnnnnnnnnnnnnnnnnnnnnnnnnnnnnnnnnnnnnnnnnnnnnnnnnnnnnnnnnnnnnnnnnnnnnnnnnnnnnnnnnnnnnnnnnnnnnnnnnnnnnnnnnnnnnnnnnnnnnnnnnnnnnnnnnnnnnnnnnnnnnnnnnnnnnnnnnnnnnnnnnnnnnnnnnnnnnnnnnnnnnnnnnnnnnnnnnnnnnnnnnnnnnnnnnnnnnnnnnnnnnnnnnnnnnnnnnnnnnnnnnnnnnnnnnnnnnnnnnnnnnnnnnnnnnnnnnnnnnnnnnnnnnnnnnnnnnnnnnnnnnnnnnnnnnnnnnnnnnnnnnnnnnnnnnnnnnnnnnnnnnnnnnnnnnnnnnnnnnnnnnnnnnnnnnnnnnnnnnnnnnnnnnnnnnnnnnnnnnnnnnnnnnnnnnnnnnnnnnnnnnnnnnnnnnnnnnnnnnnnnnnnnnnnnnnnnnnnnnnnnnnnnnnnnnnnnnnnnnnnnnnnnnnnnnnnnnnnnnnnnnnnnnnnnnnnnnnnnnnnnnnnnnnnnnnnnnnnnnnnnnnnnnnnnnnnnnnnnnnnnnnnnnnnnnnnnnnnnnnnnnnnnnnnnnnnnnnnnnnnnnnnnnnnnnnnnnnnnnnnnnnnnnnnnnnnnnnnnnnnnnnnnnnnnnnnnnnnnnnnnnnnnnnnnnnnnnnnnnnnnnnnnnnnnnnnnnnnnnnnnnnnnnnnnnnnnnnnnnnnnnnnnnnnnnnnnnnnnnnnnnnnnnnnnnnnnnnnnnnnnnnnnnnnnnnnnnnnnnnnnnnnnnnnnnnnnnnnnnnnnnnnnnnnnnnnnnnnnnnnnnnnnnnnnnnnnnnnnnnnnnnnnnnnnnnnnnnnnnnnnnnnnnnnnnnnnnnnnnnnnnnnnnnnnnnnnnnnnnnnnnnnnnnnnnnnnnnnnnnnnnnnnnnnnnnnnnnnnnnnnnnnnnnnnnnnnnnnnnnnnnnnnnnnnnnnnnnnnnnnnnnnnnnnnnnnnnnnnnnnnnnnnnnnnnnnnnnnnnnnnnnnnnnnnnnnnnnnnnnnnnnnnnnnnnnnnnnnnnnnnnnnnnnnnnnnnnnnnnnnnnnnnnnnnnnnnnnnnnnnnnnnnnnnnnnnnnnnnnnnnnnnnnnnnnnnnnnnnnnnnnnnnnnnnnnnnnnnnnnnnnnnnnnnnnnnnnnnnnnnnnnnnnnnnnnnnnnnnnnnnnnnnnnnnnnnnnnnnnnnnnnnnnnnnnnnnnnnnnnnnnnnnnnnnnnnnnnnnnnnnnnnnnnnnnnnnnnnnnnnnnnnnnnnnnnnnnnnnnnnnnnnnnnnnnnnnnnnnnnnnnnnnnnnnnnnnnnnnnnnnnnnnnnnnnnnnnnnnnnnnnnnnnnnnnnnnnnnnnnnnnnnnnnnnnnnnnnnnnnnnnnnnnnnnnnnnnnnnnnnnnnnnnnnnnnnnnnnnnnnnnnnnnnnnnnnnnnnnnnnnnnnnnnnnnnnnnnnnnnnnnnnnnnnnnnnnnnnnnnnnnnnnnnnnnnnnnnnnnnnnnnnnnnnnnnnnnnnnnnnnnnnnnnnnnnnnnnnnnnnnnnnnnnnnnnnnnnnnnnnnnnnnnnnnnnnnnnnnnnnnnnnnnnnnnnnnnnnnnnnnnnnnnnnnnnnnnnnnnnnnnnnnnnnnnnnnnnnnnnnnnnnnnnnnnnnnnnnnnnnnnnnnnnnnnnnnnnnnnnnnnnnnnnnnnnnnnnnnnnnnnnnnnnnnnnnnnnnnnnnnnnnnnnnnnnnnnnnnnnnnnnnnnnnnnnnnnnnnnnnnnnnnnnnnnnnnnnnnnnnnnnnnnnnnnnnnnnnnnnnnnnnnnnnnnnnnnnnnnnnnnnnnnnnnnnnnnnnnnnnnnnnnnnnnnnnnnnnnnnnnnnnnnnnnnnnnnnnnnnnnnnnnnnnnnnnnnnnnnnnnnnnnnnnnnnnnnnnnnnnnnnnnnnnnnnnnnnnnnnnnnnnnnnnnnnnnnnnnnnnnnnnnnnnnnnnnnnnnnnnnnnnnnnnnnnnnnnnnnnnnnnnnnnnnnnnnnnnnnnnnnnnnnnnnnnnnnnnnnnnnnnnnnnnnnnnnnnnnnnnnnnnnnnnnnnnnnnnnnnnnnnnnnnnnnnnnnnnnnnnnnnnnnnnnnnnnnnnnnnnnnnnnnnnnnnnnnnnnnnnnnnnnnnnnnnnnnnnnnnnnnnnnnnnnnnnnnnnnnnnnnnnnnnnnnnnnnnnnnnnnnnnnnnnnnnnnnnnnnnnnnnnnnnnnnnnnnnnnnnnnnnnnnnnnnnnnnnnnnnnnnnnnnnnnnnnnnnnnnnnnnnnnnnnnnnnnnnnnnnnnnnnnnnnnnnnnnnnnnnnnnnnnnnnnnnnnnnnnnnnnnnnnnnnnnnnnnnnnnnnnnnnnnnnnnnnnnnnnnnnnnnnnnnnnnnnnnnnnnnnnnnnnnnnnnnnnnnnnnnnnnnnnnnnnnnnnnnnnnnnnnnnnnnnnnnnnnnnnnnnnnnnnnnnnnnnnnnnnnnnnnnnnnnnnnnnnnnnnnnnnnnnnnnnnnnnnnnnnnnnnnnnnnnnnnnnnnnnnnnnnnnnnnnnnnnnnnnnnnnnnnnnnnnnnnnnnnnnnnnnnnnnnnnnnnnnnnnnnnnnnnnnnnnnnnnnnnnnnnnnnnnnnnnnnnnnnnnnnnnnnnnnnnnnnnnnnnnnnnnnnnnnnnnnnnnnnnnnnnnnnnnnnnnnnnnnnnnnnnnnnnnnnnnnnnnnnnnnnnnnnnnnnnnnnnnnnnnnnnnnnnnnnnnnnnnnnnnnnnnnnnnnnnnnnnnnnnnnnnnnnnnnnnnnnnnnnnnnnnnnnnnnnnnnnnnnnnnnnnnnnnnnnnnnnnnnnnnnnnnnnnnnnnnnnnnnnnnnnnnnnnnnnnnnnnnnnnnnnnnnnnnnnnnnnnnnnnnnnnnnnnnnnnnnnnnnnnnnnnnnnnnnnnnnnnnnnnnnnnnnnnnnnnnnnnnnnnnnnnnnnnnnnnnnnnnnnnnnnnnnnnnnnnnnnnnnnnnnnnnnnnnnnnnnnnnnnnnnnnnnnnnnnnnnnnnnnnnnnnnnnnnnnnnnnnnnnnnnnnnnnnnnnnnnnnnnnnnnnnnnnnnnnnnnnnnnnnnnnnnnnnnnnnnnnnnnnnnnnnnnnnnnnnnnnnnnnnnnnnnnnnnnnnnnnnnnnnnnnnnnnnnnnnnnnnnnnnnnnnnnnnnnnnnnnnnnnnnnnnnnnnnnnnnnnnnnnnnnnnnnnnnnnnnnnnnnnnnnnnnnnnnnnnnnnnnnnnnnnnnnnnnnnnnnnnnnnnnnnnnnnnnnnnnnnnnnnnnnnnnnnnnnnnnnnnnnnnnnnnnnnnnnnnnnnnnnnnnnnnnnnnnnnnnnnnnnnnnnnnnnnnnnnnnnnnnnnnnnnnnnnnnnnnnnnnnnnnnnnnnnnnnnnnnnnnnnnnnnnnnnnnnnnnnnnnnnnnnnnnnnnnnnnnnnnnnnnnnnnnnnnnnnnnnnnnnnnnnnnnnnnnnnnnnnnnnnnnnnnnnnnnnnnnnnnnnnnnnnnnnnnnnnnnnnnnnnnnnnnnnnnnnnnnnnnnnnnnnnnnnnnnnnnnnnnnnnnnnnnnnnnnnnnnnnnnnnnnnnnnnnnnnnnnnnnnnnnnnnnnnnnnnnnnnnnnnnnnnnnnnnnnnnnnnnnnnnnnnnnnnnnnnnnnnnnnnnnnnnnnnnnnnnnnnnnnnnnnnnnnnnnnnnnnnnnnnnnnnnnnnnnnnnnnnnnnnnnnnnnnnnnnnnnnnnnnnnnnnnnnnnnnnnnnnnnnnnnnnnnnnnnnnnnnnnnnnnnnnnnnnnnnnnnnnnnnnnnnnnnnnnnnnnnnnnnnnnnnnnnnnnnnnnnnnnnnnnnnnnnnnnnnnnnnnnnnnnnnnnnnnnnnnnnnnnnnnnnnnnnnnnnnnnnnnnnnnnnnnnnnnnnnnnnnnnnnnnnnnnnnnnnnnnnnnnnnnnnnnnnnnnnnnnnnnnnnnnnnnnnnnnnnnnnnnnnnnnnnnnnnnnnnnnnnnnnnnnnnnnnnnnnnnnnnnnnnnnnnnnnnnnnnnnnnnnnnnnnnnnnnnnnnnnnnnnnnnnnnnnnnnnnnnnnnnnnnnnnnnnnnnnnnnnnnnnnnnnnnnnnnnnnnnnnnnnnnnnnnnnnnnnnnnnnnnnnnnnnnnnnnnnnnnnnnnnnnnnnnnnnnnnnnnnnnnnnnnnnnnnnnnnnnnnnnnnnnnnnnnnnnnnnnnnnnnnnnnnnnnnnnnnnnnnnnnnnnnnnnnnnnnnnnnnnnnnnnnnnnnnnnnnnnnnnnnnnnnnnnnnnnnnnnnnnnnnnnnnnnnnnnnnnnnnnnnnnnnnnnnnnnnnnnnnnnnnnnnnnnnnnnnnnnnnnnnnnnnnnnnnnnnnnnnnnnnnnnnnnnnnnnnnnnnnnnnnnnnnnnnnnnnnnnnnnnnnnnnnnnnnnnnnnnnnnnnnnnnnnnnnnnnnnnnnnnnnnnnnnnnnnnnnnnnnnnnnnnnnnnnnnnnnnnnnnnnnnnnnnnnnnnnnnnnnnnnnnnnnnnnnnnnnnnnnnnnnnnnnnnnnnnnnnnnnnnnnnnnnnnnnnnnnnnnnnnnnnnnnnnnnnnnnnnnnnnnnnnnnnnnnnnnnnnnnnnnnnnnnnnnnnnnnnnnnnnnnnnnnnnnnnnnnnnnnnnnnnnnnnnnnnnnnnnnnnnnnnnnnnnnnnnnnnnnnnnnnnnnnnnnnnnnnnnnnnnnnnnnnnnnnnnnnnnnnnnnnnnnnnnnnnnnnnnnnnnnnnnnnnnnnnnnnnnnnnnnnnnnnnnnnnnnnnnnnnnnnnnnnnnnnnnnnnnnnnnnnnnnnnnnnnnnnnnnnnnnnnnnnnnnnnnnnnnnnnnnnnnnnnnnnnnnnnnnnnnnnnnnnnnnnnnnnnnnnnnnnnnnnnnnnnnnnnnnnnnnnnnnnnnnnnnnnnnnnnnnnnnnnnnnnnnnnnnnnnnnnnnnnnnnnnnnnnnnnnnnnnnnnnnnnnnnnnnnnnnnnnnnnnnnnnnnnnnnnnnnnnnnnnnnnnnnnnnnnnnnnnnnnnnnnnnnnnnnnnnnnnnnnnnnnnnnnnnnnnnnnnnnnnnnnnnnnnnnnnnnnnnnnnnnnnnnnnnnnnnnnnnnnnnnnnnnnnnnnnnnnnnnnnnnnnnnnnnnnnnnnnnnnnnnnnnnnnnnnnnnnnnnnnnnnnnnnnnnnnnnnnnnnnnnnnnnnnnnnnnnnnnnnnnnnnnnnnnnnnnnnnnnnnnnnnnnnnnnnnnnnnnnnnnnnnnnnnnnnnnnnnnnnnnnnnnnnnnnnnnnnnnnnnnnnnnnnnnnnnnnnnnnnnnnnnnnnnnnnnnnnnnnnnnnnnnnnnnnnnnnnnnnnnnnnnnnnnnnnnnnnnnnnnnnnnnnnnnnnnnnnnnnnnnnnnnnnnnnnnnnnnnnnnnnnnnnnnnnnnnnnnnnnnnnnnnnnnnnnnnnnnnnnnnnnnnnnnnnnnnnnnnnnnnnnnnnnnnnnnnnnnnnnnnnnnnnnnnnnnnnnnnnnnnnnnnnnnnnnnnnnnnnnnnnnnnnnnnnnnnnnnnnnnnnnnnnnnnnnnnnnnnnnnnnnnnnnnnnnnnnnnnnnnnnnnnnnnnnnnnnnnnnnnnnnnnnnnnnnnnnnnnnnnnnnnnnnnnnnnnnnnnnnnnnnnnnnnnnnnnnnnnnnnnnnnnnnnnnnnnnnnnnnnnnnnnnnnnnnnnnnnnnnnnnnnnnnnnnnnnnnnnnnnnnnnnnnnnnnnnnnnnnnnnnnnnnnnnnnnnnnnnnnnnnnnnnnnnnnnnnnnnnnnnnnnnnnnnnnnnnnnnnnnnnnnnnnnnnnnnnnnnnnnnnnnnnnnnnnnnnnnnnnnnnnnnnnnnnnnnnnnnnnnnnnnnnnnnnnnnnnnnnnnnnnnnnnnnnnnnnnnnnnnnnnnnnnnnnnnnnnnnnnnnnnnnnnnnnnnnnnnnnnnnnnnnnnnnnnnnnnnnnnnnnnnnnnnnnnnnnnnnnnnnnnnnnnnnnnnnnnnnnnnnnnnnnnnnnnnnnnnnnnnnnnnnnnnnnnnnnnnnnnnnnnnnnnnnnnnnnnnnnnnnnnnnnnnnnnnnnnnnnnnnnnnnnnnnnnnnnnnnnnnnnnnnnnnnnnnnnnnnnnnnnnnnnnnnnnnnnnnnnnnnnnnnnnnnnnnnnnnnnnnnnnnnnnnnnnnnnnnnnnnnnnnnnnnnnnnnnnnnnnnnnnnnnnnnnnnnnnnnnnnnnnnnnnnnnnnnnnnnnnnnnnnnnnnnnnnnnnnnnnnnnnnnnnnnnnnnnnnnnnnnnnnnnnnnnnnnnnnnnnnnnnnnnnnnnnnnnnnnnnnnnnnnnnnnnnnnnnnnnnnnnnnnnnnnnnnnnnnnnnnnnnnnnnnnnnnnnnnnnnnnnnnnnnnnnnnnnnnnnnnnnnnnnnnnnnnnnnnnnnnnnnnnnnnnnnnnnnnnnnnnnnnnnnnnnnnnnnnnnnnnnnnnnnnnnnnnnnnnnnnnnnnnnnnnnnnnnnnnnnnnnnnnnnnnnnnnnnnnnnnnnnnnnnnnnnnnnnnnnnnnnnnnnnnnnnnnnnnnnnnnnnnnnnnnnnnnnnnnnnnnnnnnnnnnnnnnnnnnnnnnnnnnnnnnnnnnnnnnnnnnnnnnnnnnnnnnnnnnnnnnnnnnnnnnnnnnnnnnnnnnnnnnnnnnnnnnnnnnnnnnnnnnnnnnnnnnnnnnnnnnnnnnnnnnnnnnnnnnnnnnnnnnnnnnnnnnnnnnnnnnnnnnnnnnnnnnnnnnnnnnnnnnnnnnnnnnnnnnnnnnnnnnnnnnnnnnnnnnnnnnnnnnnnnnnnnnnnnnnnnnnnnnnnnnnnnnnnnnnnnnnnnnnnnnnnnnnnnnnnnnnnnnnnnnnnnnnnnnnnnnnnnnnnnnnnnnnnnnnnnnnnnnnnnnnnnnnnnnnnnnnnnnnnnnnnnnnnnnnnnnnnnnnnnnnnnnnnnnnnnnnnnnnnnnnnnnnnnnnnnnnnnnnnnnnnnnnnnnnnnnnnnnnnnnnnnnnnnnnnnnnnnnnnnnnnnnnnnnnnnnnnnnnnnnnnnnnnnnnnnnnnnnnnnnnnnnnnnnnnnnnnnnnnnnnnnnnnnnnnnnnnnnnnnnnnnnnnnnnnnnnnnnnnnnnnnnnnnnnnnnnnnnnnnnnnnnnnnnnnnnnnnnnnnnnnnnnnnnnnnnnnnnnnnnnnnnnnnnnnnnnnnnnnnnnnnnnnnnnnnnnnnnnnnnnnnnnnnnnnnnnnnnnnnnnnnnnnnnnnnnnnnnnnnnnnnnnnnnnnnnnnnnnnnnnnnnnnnnnnnnnnnnnnnnnnnnnnnnnnnnnnnnnnnnnnnnnnnnnnnnnnnnnnnnnnnnnnnnnnnnnnnnnnnnnnnnnnnnnnnnnnnnnnnnnnnnnnnnnnnnnnnnnnnnnnnnnnnnnnnnnnnnnnnnnnnnnnnnnnnnnnnnnnnnnnnnnnnnnnnnnnnnnnnnnnnnnnnnnnnnnnnnnnnnnnnnnnnnnnnnnnnnnnnnnnnnnnnnnnnnnnnnnnnnnnnnnnnnnnnnnnnnnnnnnnnnnnnnnnnnnnnnnnnnnnnnnnnnnnnnnnnnnnnnnnnnnnnnnnnnnnnnnnnnnnnnnnnnnnnnnnnnnnnnnnnnnnnnnnnnnnnnnnnnnnnnnnnnnnnnnnnnnnnnnnnnnnnnnnnnnnnnnnnnnnnnnnnnnnnnnnnnnnnnnnnnnnnnnnnnnnnnnnnnnnnnnnnnnnnnnnnnnnnnnnnnnnnnnnnnnnnnnnnnnnnnnnnnnnnnnnnnnnnnnnnnnnnnnnnnnnnnnnnnnnnnnnnnnnnnnnnnnnnnnnnnnnnnnnnnnnnnnnnnnnnnnnnnnnnnnnnnnnnnnnnnnnnnnnnnnnnnnnnnnnnnnnnnnnnnnnnnnnnnnnnnnnnnnnnnnnnnnnnnnnnnnnnnnnnnnnnnnnnnnnnnnnnnnnnnnnnnnnnnnnnnnnnnnnnnnnnnnnnnnnnnnnnnnnnnnnnnnnnnnnnnnnnnnnnnnnnnnnnnnnnnnnnnnnnnnnnnnnnnnnnnnnnnnnnnnnnnnnnnnnnnnnnnnnnnnnnnnnnnnnnnnnnnnnnnnnnnnnnnnnnnnnnnnnnnnnnnnnnnnnnnnnnnnnnnnnnnnnnnnnnnnnnnnnnnnnnnnnnnnnnnnnnnnnnnnnnnnnnnnnnnnnnnnnnnnnnnnnnnnnnnnnnnnnnnnnnnnnnnnnnnnnnnnnnnnnnnnnnnnnnnnnnnnnnnnnnnnnnnnnnnnnnnnnnnnnnnnnnnnnnnnnnnnnnnnnnnnnnnnnnnnnnnnnnnnnnnnnnnnnnnnnnnnnnnnnnnnnnnnnnnnnnnnnnnnnnnnnnnnnnnnnnnnnnnnnnnnnnnnnnnnnnnnnnnnnnnnnnnnnnnnnnnnnnnnnnnnnnnnnnnnnnnnnnnnnnnnnnnnnnnnnnnnnnnnnnnnnnnnnnnnnnnnnnnnnnnnnnnnnnnnnnnnnnnnnnnnnnnnnnnnnnnnnnnnnnnnnnnnnnnnnnnnnnnnnnnnnnnnnnnnnnnnnnnnnnnnnnnnnnnnnnnnnnnnnnnnnnnnnnnnnnnnnnnnnnnnnnnnnnnnnnnnnnnnnnnnnnnnnnnnnnnnnnnnnnnnnnnnnnnnnnnnnnnnnnnnnnnnnnnnnnnnnnnnnnnnnnnnnnnnnnnnnnnnnnnnnnnnnnnnnnnnnnnnnnnnnnnnnnnnnnnnnnnnnnnnnnnnnnnnnnnnnnnnnnnnnnnnnnnnnnnnnnnnnnnnnnnnnnnnnnnnnnnnnnnnnnnnnnnnnnnnnnnnnnnnnnnnnnnnnnnnnnnnnnnnnnnnnnnnnnnnnnnnnnnnnnnnnnnnnnnnnnnnnnnnnnnnnnnnnnnnnnnnnnnnnnnnnnnnnnnnnnnnnnnnnnnnnnnnnnnnnnnnnnnnnnnnnnnnnnnnnnnnnnnnnnnnnnnnnnnnnnnnnnnnnnnnnnnnnnnnnnnnnnnnnnnnnnnnnnnnnnnnnnnnnnnnnnnnnnnnnnnnnnnnnnnnnnnnnnnnnnnnnnnnnnnnnnnnnnnnnnnnnnnnnnnnnnnnnnnnnnnnnnnnnnnnnnnnnnnnnnnnnnnnnnnnnnnnnnnnnnnnnnnnnnnnnnnnnnnnnnnnnnnnnnnnnnnnnnnnnnnnnnnnnnnnnnnnnnnnnnnnnnnnnnnnnnnnnnnnnnnnnnnnnnnnnnnnnnnnnnnnnnnnnnnnnnnnnnnnnnnnnnnnnnnnnnnnnnnnnnnnnnnnnnnnnnnnnnnnnnnnnnnnnnnnnnnnnnnnnnnnnnnnnnnnnnnnnnnnnnnnnnnnnnnnnnnnnnnnnnnnnnnnnnnnnnnnnnnnnnnnnnnnnnnnnnnnnnnnnnnnnnnnnnnnnnnnnnnnnnnnnnnnnnnnnnnnnnnnnnnnnnnnnnnnnnnnnnnnnnnnnnnnnnnnnnnnnnnnnnnnnnnnnnnnnnnnnnnnnnnnnnnnnnnnnnnnnnnnnnnnnnnnnnnnnnnnnnnnnnnnnnnnnnnnnnnnnnnnnnnnnnnnnnnnnnnnnnnnnnnnnnnnnnnnnnnnnnnnnnnnnnnnnnnnnnnnnnnnnnnnnnnnnnnnnnnnnnnnnnnnnnnnnnnnnnnnnnnnnnnnnnnnnnnnnnnnnnnnnnnnnnnnnnnnnnnnnnnnnnnnnnnnnnnnnnnnnnnnnnnnnnnnnnnnnnnnnnnnnnnnnnnnnnnnnnnnnnnnnnnnnnnnnnnnnnnnnnnnnnnnnnnnnnnnnnnnnnnnnnnnnnnnnnnnnnnnnnnnnnnnnnnnnnnnnnnnnnnnnnnnnnnnnnnnnnnnnnnnnnnnnnnnnnnnnnnnnnnnnnnnnnnnnnnnnnnnnnnnnnnnnnnnnnnnnnnnnnnnnnnnnnnnnnnnnnnnnnnnnnnnnnnnnnnnnnnnnnnnnnnnnnnnnnnnnnnnnnnnnnnnnnnnnnnnnnnnnnnnnnnnnnnnnnnnnnnnnnnnnnnnnnnnnnnnnnnnnnnnnnnnnnnnnnnnnnnnnnnnnnnnnnnnnnnnnnnnnnnnnnnnnnnnnnnnnnnnnnnnnnnnnnnnnnnnnnnnnnnnnnnnnnnnnnnnnnnnnnnnnnnnnnnnnnnnnnnnnnnnnnnnnnnnnnnnnnnnnnnnnnnnnnnnnnnnnnnnnnnnnnnnnnnnnnnnnnnnnnnnnnnnnnnnnnnnnnnnnnnnnnnnnnnnnnnnnnnnnnnnnnnnnnnnnnnnnnnnnnnnnnnnnnnnnnnnnnnnnnnnnnnnnnnnnnnnnnnnnnnnnnnnnnnnnnnnnnnnnnnnnnnnnnnnnnnnnnnnnnnnnnnnnnnnnnnnnnnnnnnnnnnnnnnnnnnnnnnnnnnnnnnnnnnnnnnnnnnnnnnnnnnnnnnnnnnnnnnnnnnnnnnnnnnnnnnnnnnnnnnnnnnnnnnnnnnnnnnnnnnnnnnnnnnnnnnnnnnnnnnnnnnnnnnnnnnnnnnnnnnnnnnnnnnnnnnnnnnnnnnnnnnnnnnnnnnnnnnnnnnnnnnnnnnnnnnnnnnnnnnnnnnnnnnnnnnnnnnnnnnnnnnnnnnnnnnnnnnnnnnnnnnnnnnnnnnnnnnnnnnnnnnnnnnnnnnnnnnnnnnnnnnnnnnnnnnnnnnnnnnnnnnnnnnnnnnnnnnnnnnnnnnnnnnnnnnnnnnnnnnnnnnnnnnnnnnnnnnnnnnnnnnnnnnnnnnnnnnnnnnnnnnnnnnnnnnnnnnnnnnnnnnnnnnnnnnnnnnnnnnnnnnnnnnnnnnnnnnnnnnnnnnnnnnnnnnnnnnnnnnnnnnnnnnnnnnnnnnnnnnnnnnnnnnnnnnnnnnnnnnnnnnnnnnnnnnnnnnnnnnnnnnnnnnnnnnnnnnnnnnnnnnnnnnnnnnnnnnnnnnnnnnnnnnnnnnnnnnnnnnnnnnnnnnnnnnnnnnnnnnnnnnnnnnnnnnnnnnnnnnnnnnnnnnnnnnnnnnnnnnnnnnnnnnnnnnnnnnnnnnnnnnnnnnnnnnnnnnnnnnnnnnnnnnnnnnnnnnnnnnnnnnnnnnnnnnnnnnnnnnnnnnnnnnnnnnnnnnnnnnnnnnnnnnnnnnnnnnnnnnnnnnnnnnnnnnnnnnnnnnnnnnnnnnnnnnnnnnnnnnnnnnnnnnnnnnnnnnnnnnnnnnnnnnnnnnnnnnnnnnnnnnnnnnnnnnnnnnnnnnnnnnnnnnnnnnnnnnnnnnnnnnnnnnnnnnnnnnnnnnnnnnnnnnnnnnnnnnnnnnnnnnnnnnnnnnnnnnnnnnnnnnnnnnnnnnnnnnnnnnnnnnnnnnnnnnnnnnnnnnnnnnnnnnnnnnnnnnnnnnnnnnnnnnnnnnnnnnnnnnnnnnnnnnnnnnnnnnnnnnnnnnnnnnnnnnnnnnnnnnnnnnnnnnnnnnnnnnnnnnnnnnnnnnnnnnnnnnnnnnnnnnnnnnnnnnnnnnnnnnnnnnnnnnnnnnnnnnnnnnnnnnnnnnnnnnnnnnnnnnnnnnnnnnnnnnnnnnnnnnnnnnnnnnnnnnnnnnnnnnnnnnnnnnnnnnnnnnnnnnnnnnnnnnnnnnnnnnnnnnnnnnnnnnnnnnnnnnnnnnnnnnnnnnnnnnnnnnnnnnnnnnnnnnnnnnnnnnnnnnnnnnnnnnnnnnnnnnnnnnnnnnnnnnnnnnnnnnnnnnnnnnnnnnnnnnnnnnnnnnnnnnnnnnnnnnnnnnnnnnnnnnnnnnnnnnnnnnnnnnnnnnnnnnnnnnnnnnnnnnnnnnnnnnnnnnnnnnnnnnnnnnnnnnnnnnnnnnnnnnnnnnnnnnnnnnnnnnnnnnnnnnnnnnnnnnnnnnnnnnnnnnnnnnnnnnnnnnnnnnnnnnnnnnnnnnnnnnnnnnnnnnnnnnnnnnnnnnnnnnnnnnnnnnnnnnnnnnnnnnnnnnnnnnnnnnnnnnnnnnnnnnnnnnnnnnnnnnnnnnnnnnnnnnnnnnnnnnnnnnnnnnnnnnnnnnnnnnnnnnnnnnnnnnnnnnnnnnnnnnnnnnnnnnnnnnnnnnnnnnnnnnnnnnnnnnnnnnnnnnnnnnnnnnnnnnnnnnnnnnnnnnnnnnnnnnnnnnnnnnnnnnnnnnnnnnnnnnnnnnnnnnnnnnnnnnnnnnnnnnnnnnnnnnnnnnnnnnnnnnnnnnnnnnnnnnnnnnnnnnnnnnnnnnnnnnnnnnnnnnnnnnnnnnnnnnnnnnnnnnnnnnnnnnnnnnnnnnnnnnnnnnnnnnnnnnnnnnnnnnnnnnnnnnnnnnnnnnnnnnnnnnnnnnnnnnnnnnnnnnnnnnnnnnnnnnnnnnnnnnnnnnnnnnnnnnnnnnnnnnnnnnnnnnnnnnnnnnnnnnnnnnnnnnnnnnnnnnnnnnnnnnnnnnnnnnnnnnnnnnnnnnnnnnnnnnnnnnnnnnnnnnnnnnnnnnnnnnnnnnnnnnnnnnnnnnnnnnnnnnnnnnnnnnnnnnnnnnnnnnnnnnnnnnnnnnnnnnnnnnnnnnnnnnnnnnnnnnnnnnnnnnnnnnnnnnnnnnnnnnnnnnnnnnnnnnnnnnnnnnnnnnnnnnnnnnnnnnnnnnnnnnnnnnnnnnnnnnnnnnnnnnnnnnnnnnnnnnnnnnnnnnnnnnnnnnnnnnnnnnnnnnnnnnnnnnnnnnnnnnnnnnnnnnnnnnnnnnnnnnnnnnnnnnnnnnnnnnnnnnnnnnnnnnnnnnnnnnnnnnnnnnnnnnnnnnnnnnnnnnnnnnnnnnnnnnnnnnnnnnnnnnnnnnnnnnnnnnnnnnnnnnnnnnnnnnnnnnnnnnnnnnnnnnnnnnnnnnnnnnnnnnnnnnnnnnnnnnnnnnnnnnnnnnnnnnnnnnnnnnnnnnnnnnnnnnnnnnnnnnnnnnnnnnnnnnnnnnnnnnnnnnnnnnnnnnnnnnnnnnnnnnnnnnnnnnnnnnnnnnnnnnnnnnnnnnnnnnnnnnnnnnnnnnnnnnnnnnnnnnnnnnnnnnnnnnnnnnnnnnnnnnnnnnnnnnnnnnnnnnnnnnnnnnnnnnnnnnnnnnnnnnnnnnnnnnnnnnnnnnnnnnnnnnnnnnnnnnnnnnnnnnnnnnnnnnnnnnnnnnnnnnnnnnnnnnnnnnnnnnnnnnnnnnnnnnnnnnnnnnnnnnnnnnnnnnnnnnnnnnnnnnnnnnnnnnnnnnnnnnnnnnnnnnnnnnnnnnnnnnnnnnnnnnnnnnnnnnnnnnnnnnnnnnnnnnnnnnnnnnnnnnnnnnnnnnnnnnnnnnnnnnnnnnnnnnnnnnnnnnnnnnnnnnnnnnnnnnnnnnnnnnnnnnnnnnnnnnnnnnnnnnnnnnnnnnnnnnnnnnnnnnnnnnnnnnnnnnnnnnnnnnnnnnnnnnnnnnnnnnnnnnnnnnnnnnnnnnnnnnnnnnnnnnnnnnnnnnnnnnnnnnnnnnnnnnnnnnnnnnnnnnnnnnnnnnnnnnnnnnnnnnnnnnnnnnnnnnnnnnnnnnnnnnnnnnnnnnnnnnnnnnnnnnnnnnnnnnnnnnnnnnnnnnnnnnnnnnnnnnnnnnnnnnnnnnnnnnnnnnnnnnnnnnnnnnnnnnnnnnnnnnnnnnnnnnnnnnnnnnnnnnnnnnnnnnnnnnnnnnnnnnnnnnnnnnnnnnnnnnnnnnnnnnnnnnnnnnnnnnnnnnnnnnnnnnnnnnnnnnnnnnnnnnnnnnnnnnnnnnnnnnnnnnnnnnnnnnnnnnnnnnnnnnnnnnnnnnnnnnnnnnnnnnnnnnnnnnnnnnnnnnnnnnnnnnnnnnnnnnnnnnnnnnnnnnnnnnnnnnnnnnnnnnnnnnnnnnnnnnnnnnnnnnnnnnnnnnnnnnnnnnnnnnnnnnnnnnnnnnnnnnnnnnnnnnnnnnnnnnnnnnnnnnnnnnnnnnnnnnnnnnnnnnnnnnnnnnnnnnnnnnnnnnnnnnnnnnnnnnnnnnnnnnnnnnnnnnnnnnnnnnnnnnnnnnnnnnnnnnnnnnnnnnnnnnnnnnnnnnnnnnnnnnnnnnnnnnnnnnnnnnnnnnnnnnnnnnnnnnnnnnnnnnnnnnnnnnnnnnnnnnnnnnnnnnnnnnnnnnnnnnnnnnnnnnnnnnnnnnnnnnnnnnnnnnnnnnnnnnnnnnnnnnnnnnnnnnnnnnnnnnnnnnnnnnnnnnnnnnnnnnnnnnnnnnnnnnnnnnnnnnnnnnnnnnnnnnnnnnnnnnnnnnnnnnnnnnnnnnnnnnnnnnnnnnnnnnnnnnnnnnnnnnnnnnnnnnnnnnnnnnnnnnnnnnnnnnnnnnnnnnnnnnnnnnnnnnnnnnnnnnnggtctcnngagaccnngtc

SEQ ID NO: 20 - DNA, 300041 bp, Artificial Sequence
  source: /note="Description of Artificial Sequence: Synthetic polynucleotide"
  modified_base (11)..(15): a, c, t, or g
  modified_base (23)..(300022): a, c, t, or g
  misc_feature (23)..(300022): /note="This region may encompass 0-300000 nucleotides"
  modified_base (300030)..(300031): a, c, t, or g
  source: /note="See specification as filed for detailed description of substitutions and preferred embodiments"
gaagctcttcnnnnngaagagcnnnnnnnnnnnnnnnnnnnnnnnnnnnnnnnnnnnnnnnnnnnnnnnnnnnnnnnnnnnnnnnnnnnnnnnnnnnnnnnnnnnnnnnnnnnnnnnnnnnnnnnnnnnnnnnnnnnnnnnnnnnnnnnnnnnnnnnnnnnnnnnnnnnnnnnnnnnnnnnnnnnnnnnnnnnnnnnnnnnnnnnnnnnnnnnnnnnnnnnnnnnnnnnnnnnnnnnnnnnnnnnnnnnnnnnnnnnnnnnnnnnnnnnnnnnnnnnnnnnnnnnnnnnnnnnnnnnnnnnnnnnnnnnnnnnnnnnnnnnnnnnnnnnnnnnnnnnnnnnnnnnnnnnnnnnnnnnnnnnnnnnnnnnnnnnnnnnnnnnnnnnnnnnnnnnnnnnnnnnnnnnnnnnnnnnnnnnnnnnnnnnnnnnnnnnnnnnnnnnnnnnnnnnnnnnnnnnnnnnnnnnnnnnnnnnnnnnnnnnnnnnnnnnnnnnnnnnnnnnnnnnnnnnnnnnnnnnnnnnnnnnnnnnnnnnnnnnnnnnnnnnnnnnnnnnnnnnnnnnnnnnnnnnnnnnnnnnnnnnnnnnnnnnnnnnnnnnnnnnnnnnnnnnnnnnnnnnnnnnnnnnnnnnnnnnnnnnnnnnnnnnnnnnnnnnnnnnnnnnnnnnnnnnnnnnnnnnnnnnnnnnnnnnnnnnnnnnnnnnnnnnnnnnnnnnnnnnnnnnnnnnnnnnnnnnnnnnnnnnnnnnnnnnnnnnnnnnnnnnnnnnnnnnnnnnnnnnnnnnnnnnnnnnnnnnnnnnnnnnnnnnnnnnnnnnnnnnnnnnnnnnnnnnnnnnnnnnnnnnnnnnnnnnnnnnnnnnnnnnnnnnnnnnnnnnnnnnnnnnnnnnnnnnnnnnnnnnnnnnnnnnnnnnnnnnnnnnnnnnnnnnnnnnnnnnnnnnnnnnnnnnnnnnnnnnnnnnnnnnnnnnnnnnnnnnnnnnnnnnnnnnnnnnnnnnnnnnnnnnnnnnnnnnnnnnnnnnnnnnnnnnnnnnnnnnnnnnnnnnnnnnnnnnnnnnnnnnnnnnnnnnnnnnnnnnnnnnnnnnnnnnnnnnnnnnnnnnnnnnnnnnnnnnnnnnnnnnnnnnnnnnnnnnnnnnnnnnnnnnnnnnnnnnnnnnnnnnnnnnnnnnnnnnnnnnnnnnnnnnnnnnnnnnnnnnnnnnnnnnnnnnnnnnnnnnnnnnnnnnnnnnnnnnnnnnnnnnnnnnnnnnnnnnnnnnnnnnnnnnnnnnnnnnnnnnnnnnnnnnnnnnnnnnnnnnnnnnnnnnnnnnnnnnnnnnnnnnnnnnnnnnnnnnnnnnnnnnnnnnnnnnnnnnnnnnnnnnnnnnnnnnnnnnnnnnnnnnnnnnnnnnnnnnnnnnnnnnnnnnnnnnnnnnnnnnnnnnnnnnnnnnnnnnnnnnnnnnnnnnnnnnnnnnnnnnnnnnnnnnnnnnnnnnnnnnnnnnnnnnnnnnnnnnnnnnnnnnnnnnnnnnnnnnnnnnnnnnnnnnnnnnnnnnnnnnnnnnnnnnnnnnnnnnnnnnnnnnnnnnnnnnnnnnnnnnnnnnnnnnnnnnnnnnnnnnnnnnnnnnnnnnnnnnnnnnnnnnnnnnnnnnnnnnnnnnnnnnnnnnnnnnnnnnnnnnnnnnnnnnnnnnnnnnnnnnnnnnnnnnnnnnnnnnnnnnnnnnnnnnnnnnnnnnnnnnnnnnnnnnnnnnnnnnnnnnnnnnnnnnnnnnnnnnnnnnnnnnnnnnnnnnnnnnnnnnnnnnnnnnnnnnnnnnnnnnnnnnnnnnnnnnnnnnnnnnnnnnnnnnnnnnnnnnnnnnnnnnnnnnnnnnnnnnnnnnnnnnnnnnnnnnnnnnnnnnnnnnnnnnnnnnnnnnnnnnnnnnnnnnnnnnnnnnnnnnnnnnnnnnnnnnnnnnnnnnnnnnnnnnnnnnnnnnnnnnnnnnnnnnnnnnnnnnnnnnnnnnnnnnnnnnnnnnnnnnnnnnnnnnnnnnnnnnnnnnnnnnnnnnnnnnnnnnnnnnnnnnnnnnnnnnnnnnnnnnnnnnnnnnnnnnnnnnnnnnnnnnnnnnnnnnnnnnnnnnnnnnnnnnnnnnnnnnnnnnnnnnnnnnnnnnnnnnnnnnnnnnnnnnnnnnnnnnnnnnnnnnnnnnnnnnnnnnnnnnnnnnnnnnnnnnnnnnnnnnnnnnnnnnnnnnnnnnnnnnnnnnnnnnnnnnnnnnnnnnnnnnnnnnnnnnnnnnnnnnnnnnnnnnnnnnnnnnnnnnnnnnnnnnnnnnnnnnnnnnnnnnnnnnnnnnnnnnnnnnnnnnnnnnnnnnnnnnnnnnnnnnnnnnnnnnnnnnnnnnnnnnnnnnnnnnnnnnnnnnnnnnnnnnnnnnnnnnnnnnnnnnnnnnnnnnnnnnnnnnnnnnnnnnnnnnnnnnnnnnnnnnnnnnnnnnnnnnnnnnnnnnnnnnnnnnnnnnnnnnnnnnnnnnnnnnnnnnnnnnnnnnnnnnnnnnnnnnnnnnnnnnnnnnnnnnnnnnnnnnnnnnnnnnnnnnnnnnnnnnnnnnnnnnnnnnnnnnnnnnnnnnnnnnnnnnnnnnnnnnnnnnnnnnnnnnnnnnnnnnnnnnnnnnnnnnnnnnnnnnnnnnnnnnnnnnnnnnnnnnnnnnnnnnnnnnnnnnnnnnnnnnnnnnnnnnnnnnnnnnnnnnnnnnnnnnnnnnnnnnnnnnnnnnnnnnnnnnnnnnnnnnnnnnnnnnnnnnnnnnnnnnnnnnnnnnnnnnnnnnnnnnnnnnnnnnnnnnnnnnnnnnnnnnnnnnnnnnnnnnnnnnnnnnnnnnnnnnnnnnnnnnnnnnnnnnnnnnnnnnnnnnnnnnnnnnnnnnnnnnnnnnnnnnnnnnnnnnnnnnnnnnnnnnnnnnnnnnnnnnnnnnnnnnnnnnnnnnnnnnnnnnnnnnnnnnnnnnnnnnnnnnnnnnnnnnnnnnnnnnnnnnnnnnnnnnnnnnnnnnnnnnnnnnnnnnnnnnnnnnnnnnnnnnnnnnnnnnnnnnnnnnnnnnnnnnnnnnnnnnnnnnnnnnnnnnnnnnnnnnnnnnnnnnnnnnnnnnnnnnnnnnnnnnnnnnnnnnnnnnnnnnnnnnnnnnnnnnnnnnnnnnnnnnnnnnnnnnnnnnnnnnnnnnnnnnnnnnnnnnnnnnnnnnnnnnnnnnnnnnnnnnnnnnnnnnnnnnnnnnnnnnnnnnnnnnnnnnnnnnnnnnnnnnnnnnnnnnnnnnnnnnnnnnnnnnnnnnnnnnnnnnnnnnnnnnnnnnnnnnnnnnnnnnnnnnnnnnnnnnnnnnnnnnnnnnnnnnnnnnnnnnnnnnnnnnnnnnnnnnnnnnnnnnnnnnnnnnnnnnnnnnnnnnnnnnnnnnnnnnnnnnnnnnnnnnnnnnnnnnnnnnnnnnnnnnnnnnnnnnnnnnnnnnnnnnnnnnnnnnnnnnnnnnnnnnnnnnnnnnnnnnnnnnnnnnnnnnnnnnnnnnnnnnnnnnnnnnnnnnnnnnnnnnnnnnnnnnnnnnnnnnnnnnnnnnnnnnnnnnnnnnnnnnnnnnnnnnnnnnnnnnnnnnnnnnnnnnnnnnnnnnnnnnnnnnnnnnnnnnnnnnnnnnnnnnnnnnnnnnnnnnnnnnnnnnnnnnnnnnnnnnnnnnnnnnnnnnnnnnnnnnnnnnnnnnnnnnnnnnnnnnnnnnnnnnnnnnnnnnnnnnnnnnnnnnnnnnnnnnnnnnnnnnnnnnnnnnnnnnnnnnnnnnnnnnnnnnnnnnnnnnnnnnnnnnnnnnnnnnnnnnnnnnnnnnnnnnnnnnnnnnnnnnnnnnnnnnnnnnnnnnnnnnnnnnnnnnnnnnnnnnnnnnnnnnnnnnnnnnnnnnnnnnnnnnnnnnnnnnnnnnnnnnnnnnnnnnnnnnnnnnnnnnnnnnnnnnnnnnnnnnnnnnnnnnnnnnnnnnnnnnnnnnnnnnnnnnnnnnnnnnnnnnnnnnnnnnnnnnnnnnnnnnnnnnnnnnnnnnnnnnnnnnnnnnnnnnnnnnnnnnnnnnnnnnnnnnnnnnnnnnnnnnnnnnnnnnnnnnnnnnnnnnnnnnnnnnnnnnnnnnnnnnnnnnnnnnnnnnnnnnnnnnnnnnnnnnnnnnnnnnnnnnnnnnnnnnnnnnnnnnnnnnnnnnnnnnnnnnnnnnnnnnnnnnnnnnnnnnnnnnnnnnnnnnnnnnnnnnnnnnnnnnnnnnnnnnnnnnnnnnnnnnnnnnnnnnnnnnnnnnnnnnnnnnnnnnnnnnnnnnnnnnnnnnnnnnnnnnnnnnnnnnnnnnnnnnnnnnnnnnnnnnnnnnnnnnnnnnnnnnnnnnnnnnnnnnnnnnnnnnnnnnnnnnnnnnnnnnnnnnnnnnnnnnnnnnnnnnnnnnnnnnnnnnnnnnnnnnnnnnnnnnnnnnnnnnnnnnnnnnnnnnnnnnnnnnnnnnnnnnnnnnnnnnnnnnnnnnnnnnnnnnnnnnnnnnnnnnnnnnnnnnnnnnnnnnnnnnnnnnnnnnnnnnnnnnnnnnnnnnnnnnnnnnnnnnnnnnnnnnnnnnnnnnnnnnnnnnnnnnnnnnnnnnnnnnnnnnnnnnnnnnnnnnnnnnnnnnnnnnnnnnnnnnnnnnnnnnnnnnnnnnnnnnnnnnnnnnnnnnnnnnnnnnnnnnnnnnnnnnnnnnnnnnnnnnnnnnnnnnnnnnnnnnnnnnnnnnnnnnnnnnnnnnnnnnnnnnnnnnnnnnnnnnnnnnnnnnnnnnnnnnnnnnnnnnnnnnnnnnnnnnnnnnnnnnnnnnnnnnnnnnnnnnnnnnnnnnnnnnnnnnnnnnnnnnnnnnnnnnnnnnnnnnnnnnnnnnnnnnnnnnnnnnnnnnnnnnnnnnnnnnnnnnnnnnnnnnnnnnnnnnnnnnnnnnnnnnnnnnnnnnnnnnnnnnnnnnnnnnnnnnnnnnnnnnnnnnnnnnnnnnnnnnnnnnnnnnnnnnnnnnnnnnnnnnnnnnnnnnnnnnnnnnnnnnnnnnnnnnnnnnnnnnnnnnnnnnnnnnnnnnnnnnnnnnnnnnnnnnnnnnnnnnnnnnnnnnnnnnnnnnnnnnnnnnnnnnnnnnnnnnnnnnnnnnnnnnnnnnnnnnnnnnnnnnnnnnnnnnnnnnnnnnnnnnnnnnnnnnnnnnnnnnnnnnnnnnnnnnnnnnnnnnnnnnnnnnnnnnnnnnnnnnnnnnnnnnnnnnnnnnnnnnnnnnnnnnnnnnnnnnnnnnnnnnnnnnnnnnnnnnnnnnnnnnnnnnnnnnnnnnnnnnnnnnnnnnnnnnnnnnnnnnnnnnnnnnnnnnnnnnnnnnnnnnnnnnnnnnnnnnnnnnnnnnnnnnnnnnnnnnnnnnnnnnnnnnnnnnnnnnnnnnnnnnnnnnnnnnnnnnnnnnnnnnnnnnnnnnnnnnnnnnnnnnnnnnnnnnnnnnnnnnnnnnnnnnnnnnnnnnnnnnnnnnnnnnnnnnnnnnnnnnnnnnnnnnnnnnnnnnnnnnnnnnnnnnnnnnnnnnnnnnnnnnnnnnnnnnnnnnnnnnnnnnnnnnnnnnnnnnnnnnnnnnnnnnnnnnnnnnnnnnnnnnnnnnnnnnnnnnnnnnnnnnnnnnnnnnnnnnnnnnnnnnnnnnnnnnnnnnnnnnnnnnnnnnnnnnnnnnnnnnnnnnnnnnnnnnnnnnnnnnnnnnnnnnnnnnnnnnnnnnnnnnnnnnnnnnnnnnnnnnnnnnnnnnnnnnnnnnnnnnnnnnnnnnnnnnnnnnnnnnnnnnnnnnnnnnnnnnnnnnnnnnnnnnnnnnnnnnnnnnnnnnnnnnnnnnnnnnnnnnnnnnnnnnnnnnnnnnnnnnnnnnnnnnnnnnnnnnnnnnnnnnnnnnnnnnnnnnnnnnnnnnnnnnnnnnnnnnnnnnnnnnnnnnnnnnnnnnnnnnnnnnnnnnnnnnnnnnnnnnnnnnnnnnnnnnnnnnnnnnnnnnnnnnnnnnnnnnnnnnnnnnnnnnnnnnnnnnnnnnnnnnnnnnnnnnnnnnnnnnnnnnnnnnnnnnnnnnnnnnnnnnnnnnnnnnnnnnnnnnnnnnnnnnnnnnnnnnnnnnnnnnnnnnnnnnnnnnnnnnnnnnnnnnnnnnnnnnnnnnnnnnnnnnnnnnnnnnnnnnnnnnnnnnnnnnnnnnnnnnnnnnnnnnnnnnnnnnnnnnnnnnnnnnnnnnnnnnnnnnnnnnnnnnnnnnnnnnnnnnnnnnnnnnnnnnnnnnnnnnnnnnnnnnnnnnnnnnnnnnnnnnnnnnnnnnnnnnnnnnnnnnnnnnnnnnnnnnnnnnnnnnnnnnnnnnnnnnnnnnnnnnnnnnnnnnnnnnnnnnnnnnnnnnnnnnnnnnnnnnnnnnnnnnnnnnnnnnnnnnnnnnnnnnnnnnnnnnnnnnnnnnnnnnnnnnnnnnnnnnnnnnnnnnnnnnnnnnnnnnnnnnnnnnnnnnnnnnnnnnnnnnnnnnnnnnnnnnnnnnnnnnnnnnnnnnnnnnnnnnnnnnnnnnnnnnnnnnnnnnnnnnnnnnnnnnnnnnnnnnnnnnnnnnnnnnnnnnnnnnnnnnnnnnnnnnnnnnnnnnnnnnnnnnnnnnnnnnnnnnnnnnnnnnnnnnnnnnnnnnnnnnnnnnnnnnnnnnnnnnnnnnnnnnnnnnnnnnnnnnnnnnnnnnnnnnnnnnnnnnnnnnnnnnnnnnnnnnnnnnnnnnnnnnnnnnnnnnnnnnnnnnnnnnnnnnnnnnnnnnnnnnnnnnnnnnnnnnnnnnnnnnnnnnnnnnnnnnnnnnnnnnnnnnnnnnnnnnnnnnnnnnnnnnnnnnnnnnnnnnnnnnnnnnnnnnnnnnnnnnnnnnnnnnnnnnnnnnnnnnnnnnnnnnnnnnnnnnnnnnnnnnnnnnnnnnnnnnnnnnnnnnnnnnnnnnnnnnnnnnnnnnnnnnnnnnnnnnnnnnnnnnnnnnnnnnnnnnnnnnnnnnnnnnnnnnnnnnnnnnnnnnnnnnnnnnnnnnnnnnnnnnnnnnnnnnnnnnnnnnnnnnnnnnnnnnnnnnnnnnnnnnnnnnnnnnnnnnnnnnnnnnnnnnnnnnnnnnnnnnnnnnnnnnnnnnnnnnnnnnnnnnnnnnnnnnnnnnnnnnnnnnnnnnnnnnnnnnnnnnnnnnnnnnnnnnnnnnnnnnnnnnnnnnnnnnnnnnnnnnnnnnnnnnnnnnnnnnnnnnnnnnnnnnnnnnnnnnnnnnnnnnnnnnnnnnnnnnnnnnnnnnnnnnnnnnnnnnnnnnnnnnnnnnnnnnnnnnnnnnnnnnnnnnnnnnnnnnnnnnnnnnnnnnnnnnnnnnnnnnnnnnnnnnnnnnnnnnnnnnnnnnnnnnnnnnnnnnnnnnnnnnnnnnnnnnnnnnnnnnnnnnnnnnnnnnnnnnnnnnnnnnnnnnnnnnnnnnnnnnnnnnnnnnnnnnnnnnnnnnnnnnnnnnnnnnnnnnnnnnnnnnnnnnnnnnnnnnnnnnnnnnnnnnnnnnnnnnnnnnnnnnnnnnnnnnnnnnnnnnnnnnnnnnnnnnnnnnnnnnnnnnnnnnnnnnnnnnnnnnnnnnnnnnnnnnnnnnnnnnnnnnnnnnnnnnnnnnnnnnnnnnnnnnnnnnnnnnnnnnnnnnnnnnnnnnnnnnnnnnnnnnnnnnnnnnnnnnnnnnnnnnnnnnnnnnnnnnnnnnnnnnnnnnnnnnnnnnnnnnnnnnnnnnnnnnnnnnnnnnnnnnnnnnnnnnnnnnnnnnnnnnnnnnnnnnnnnnnnnnnnnnnnnnnnnnnnnnnnnnnnnnnnnnnnnnnnnnnnnnnnnnnnnnnnnnnnnnnnnnnnnnnnnnnnnnnnnnnnnnnnnnnnnnnnnnnnnnnnnnnnnnnnnnnnnnnnnnnnnnnnnnnnnnnnnnnnnnnnnnnnnnnnnnnnnnnnnnnnnnnnnnnnnnnnnnnnnnnnnnnnnnnnnnnnnnnnnnnnnnnnnnnnnnnnnnnnnnnnnnnnnnnnnnnnnnnnnnnnnnnnnnnnnnnnnnnnnnnnnnnnnnnnnnnnnnnnnnnnnnnnnnnnnnnnnnnnnnnnnnnnnnnnnnnnnnnnnnnnnnnnnnnnnnnnnnnnnnnnnnnnnnnnnnnnnnnnnnnnnnnnnnnnnnnnnnnnnnnnnnnnnnnnnnnnnnnnnnnnnnnnnnnnnnnnnnnnnnnnnnnnnnnnnnnnnnnnnnnnnnnnnnnnnnnnnnnnnnnnnnnnnnnnnnnnnnnnnnnnnnnnnnnnnnnnnnnnnnnnnnnnnnnnnnnnnnnnnnnnnnnnnnnnnnnnnnnnnnnnnnnnnnnnnnnnnnnnnnnnnnnnnnnnnnnnnnnnnnnnnnnnnnnnnnnnnnnnnnnnnnnnnnnnnnnnnnnnnnnnnnnnnnnnnnnnnnnnnnnnnnnnnnnnnnnnnnnnnnnnnnnnnnnnnnnnnnnnnnnnnnnnnnnnnnnnnnnnnnnnnnnnnnnnnnnnnnnnnnnnnnnnnnnnnnnnnnnnnnnnnnnnnnnnnnnnnnnnnnnnnnnnnnnnnnnnnnnnnnnnnnnnnnnnnnnnnnnnnnnnnnnnnnnnnnnnnnnnnnnnnnnnnnnnnnnnnnnnnnnnnnnnnnnnnnnnnnnnnnnnnnnnnnnnnnnnnnnnnnnnnnnnnnnnnnnnnnnnnnnnnnnnnnnnnnnnnnnnnnnnnnnnnnnnnnnnnnnnnnnnnnnnnnnnnnnnnnnnnnnnnnnnnnnnnnnnnnnnnnnnnnnnnnnnnnnnnnnnnnnnnnnnnnnnnnnnnnnnnnnnnnnnnnnnnnnnnnnnnnnnnnnnnnnnnnnnnnnnnnnnnnnnnnnnnnnnnnnnnnnnnnnnnnnnnnnnnnnnnnnnnnnnnnnnnnnnnnnnnnnnnnnnnnnnnnnnnnnnnnnnnnnnnnnnnnnnnnnnnnnnnnnnnnnnnnnnnnnnnnnnnnnnnnnnnnnnnnnnnnnnnnnnnnnnnnnnnnnnnnnnnnnnnnnnnnnnnnnnnnnnnnnnnnnnnnnnnnnnnnnnnnnnnnnnnnnnnnnnnnnnnnnnnnnnnnnnnnnnnnnnnnnnnnnnnnnnnnnnnnnnnnnnnnnnnnnnnnnnnnnnnnnnnnnnnnnnnnnnnnnnnnnnnnnnnnnnnnnnnnnnnnnnnnnnnnnnnnnnnnnnnnnnnnnnnnnnnnnnnnnnnnnnnnnnnnnnnnnnnnnnnnnnnnnnnnnnnnnnnnnnnnnnnnnnnnnnnnnnnnnnnnnnnnnnnnnnnnnnnnnnnnnnnnnnnnnnnnnnnnnnnnnnnnnnnnnnnnnnnnnnnnnnnnnnnnnnnnnnnnnnnnnnnnnnnnnnnnnnnnnnnnnnnnnnnnnnnnnnnnnnnnnnnnnnnnnnnnnnnnnnnnnnnnnnnnnnnnnnnnnnnnnnnnnnnnnnnnnnnnnnnnnnnnnnnnnnnnnnnnnnnnnnnnnnnnnnnnnnnnnnnnnnnnnnnnnnnnnnnnnnnnnnnnnnnnnnnnnnnnnnnnnnnnnnnnnnnnnnnnnnnnnnnnnnnnnnnnnnnnnnnnnnnnnnnnnnnnnnnnnnnnnnnnnnnnnnnnnnnnnnnnnnnnnnnnnnnnnnnnnnnnnnnnnnnnnnnnnnnnnnnnnnnnnnnnnnnnnnnnnnnnnnnnnnnnnnnnnnnnnnnnnnnnnnnnnnnnnnnnnnnnnnnnnnnnnnnnnnnnnnnnnnnnnnnnnnnnnnnnnnnnnnnnnnnnnnnnnnnnnnnnnnnnnnnnnnnnnnnnnnnnnnnnnnnnnnnnnnnnnnnnnnnnnnnnnnnnnnnnnnnnnnnnnnnnnnnnnnnnnnnnnnnnnnnnnnnnnnnnnnnnnnnnnnnnnnnnnnnnnnnnnnnnnnnnnnnnnnnnnnnnnnnnnnnnnnnnnnnnnnnnnnnnnnnnnnnnnnnnnnnnnnnnnnnnnnnnnnnnnnnnnnnnnnnnnnnnnnnnnnnnnnnnnnnnnnnnnnnnnnnnnnnnnnnnnnnnnnnnnnnnnnnnnnnnnnnnnnnnnnnnnnnnnnnnnnnnnnnnnnnnnnnnnnnnnnnnnnnnnnnnnnnnnnnnnnnnnnnnnnnnnnnnnnnnnnnnnnnnnnnnnnnnnnnnnnnnnnnnnnnnnnnnnnnnnnnnnnnnnnnnnnnnnnnnnnnnnnnnnnnnnnnnnnnnnnnnnnnnnnnnnnnnnnnnnnnnnnnnnnnnnnnnnnnnnnnnnnnnnnnnnnnnnnnnnnnnnnnnnnnnnnnnnnnnnnnnnnnnnnnnnnnnnnnnnnnnnnnnnnnnnnnnnnnnnnnnnnnnnnnnnnnnnnnnnnnnnnnnnnnnnnnnnnnnnnnnnnnnnnnnnnnnnnnnnnnnnnnnnnnnnnnnnnnnnnnnnnnnnnnnnnnnnnnnnnnnnnnnnnnnnnnnnnnnnnnnnnnnnnnnnnnnnnnnnnnnnnnnnnnnnnnnnnnnnnnnnnnnnnnnnnnnnnnnnnnnnnnnnnnnnnnnnnnnnnnnnnnnnnnnnnnnnnnnnnnnnnnnnnnnnnnnnnnnnnnnnnnnnnnnnnnnnnnnnnnnnnnnnnnnnnnnnnnnnnnnnnnnnnnnnnnnnnnnnnnnnnnnnnnnnnnnnnnnnnnnnnnnnnnnnnnnnnnnnnnnnnnnnnnnnnnnnnnnnnnnnnnnnnnnnnnnnnnnnnnnnnnnnnnnnnnnnnnnnnnnnnnnnnnnnnnnnnnnnnnnnnnnnnnnnnnnnnnnnnnnnnnnnnnnnnnnnnnnnnnnnnnnnnnnnnnnnnnnnnnnnnnnnnnnnnnnnnnnnnnnnnnnnnnnnnnnnnnnnnnnnnnnnnnnnnnnnnnnnnnnnnnnnnnnnnnnnnnnnnnnnnnnnnnnnnnnnnnnnnnnnnnnnnnnnnnnnnnnnnnnnnnnnnnnnnnnnnnnnnnnnnnnnnnnnnnnnnnnnnnnnnnnnnnnnnnnnnnnnnnnnnnnnnnnnnnnnnnnnnnnnnnnnnnnnnnnnnnnnnnnnnnnnnnnnnnnnnnnnnnnnnnnnnnnnnnnnnnnnnnnnnnnnnnnnnnnnnnnnnnnnnnnnnnnnnnnnnnnnnnnnnnnnnnnnnnnnnnnnnnnnnnnnnnnnnnnnnnnnnnnnnnnnnnnnnnnnnnnnnnnnnnnnnnnnnnnnnnnnnnnnnnnnnnnnnnnnnnnnnnnnnnnnnnnnnnnnnnnnnnnnnnnnnnnnnnnnnnnnnnnnnnnnnnnnnnnnnnnnnnnnnnnnnnnnnnnnnnnnnnnnnnnnnnnnnnnnnnnnnnnnnnnnnnnnnnnnnnnnnnnnnnnnnnnnnnnnnnnnnnnnnnnnnnnnnnnnnnnnnnnnnnnnnnnnnnnnnnnnnnnnnnnnnnnnnnnnnnnnnnnnnnnnnnnnnnnnnnnnnnnnnnnnnnnnnnnnnnnnnnnnnnnnnnnnnnnnnnnnnnnnnnnnnnnnnnnnnnnnnnnnnnnnnnnnnnnnnnnnnnnnnnnnnnnnnnnnnnnnnnnnnnnnnnnnnnnnnnnnnnnnnnnnnnnnnnnnnnnnnnnnnnnnnnnnnnnnnnnnnnnnnnnnnnnnnnnnnnnnnnnnnnnnnnnnnnnnnnnnnnnnnnnnnnnnnnnnnnnnnnnnnnnnnnnnnnnnnnnnnnnnnnnnnnnnnnnnnnnnnnnnnnnnnnnnnnnnnnnnnnnnnnnnnnnnnnnnnnnnnnnnnnnnnnnnnnnnnnnnnnnnnnnnnnnnnnnnnnnnnnnnnnnnnnnnnnnnnnnnnnnnnnnnnnnnnnnnnnnnnnnnnnnnnnnnnnnnnnnnnnnnnnnnnnnnnnnnnnnnnnnnnnnnnnnnnnnnnnnnnnnnnnnnnnnnnnnnnnnnnnnnnnnnnnnnnnnnnnnnnnnnnnnnnnnnnnnnnnnnnnnnnnnnnnnnnnnnnnnnnnnnnnnnnnnnnnnnnnnnnnnnnnnnnnnnnnnnnnnnnnnnnnnnnnnnnnnnnnnnnnnnnnnnnnnnnnnnnnnnnnnnnnnnnnnnnnnnnnnnnnnnnnnnnnnnnnnnnnnnnnnnnnnnnnnnnnnnnnnnnnnnnnnnnnnnnnnnnnnnnnnnnnnnnnnnnnnnnnnnnnnnnnnnnnnnnnnnnnnnnnnnnnnnnnnnnnnnnnnnnnnnnnnnnnnnnnnnnnnnnnnnnnnnnnnnnnnnnnnnnnnnnnnnnnnnnnnnnnnnnnnnnnnnnnnnnnnnnnnnnnnnnnnnnnnnnnnnnnnnnnnnnnnnnnnnnnnnnnnnnnnnnnnnnnnnnnnnnnnnnnnnnnnnnnnnnnnnnnnnnnnnnnnnnnnnnnnnnnnnnnnnnnnnnnnnnnnnnnnnnnnnnnnnnnnnnnnnnnnnnnnnnnnnnnnnnnnnnnnnnnnnnnnnnnnnnnnnnnnnnnnnnnnnnnnnnnnnnnnnnnnnnnnnnnnnnnnnnnnnnnnnnnnnnnnnnnnnnnnnnnnnnnnnnnnnnnnnnnnnnnnnnnnnnnnnnnnnnnnnnnnnnnnnnnnnnnnnnnnnnnnnnnnnnnnnnnnnnnnnnnnnnnnnnnnnnnnnnnnnnnnnnnnnnnnnnnnnnnnnnnnnnnnnnnnnnnnnnnnnnnnnnnnnnnnnnnnnnnnnnnnnnnnnnnnnnnnnnnnnnnnnnnnnnnnnnnnnnnnnnnnnnnnnnnnnnnnnnnnnnnnnnnnnnnnnnnnnnnnnnnnnnnnnnnnnnnnnnnnnnnnnnnnnnnnnnnnnnnnnnnnnnnnnnnnnnnnnnnnnnnnnnnnnnnnnnnnnnnnnnnnnnnnnnnnnnnnnnnnnnnnnnnnnnnnnnnnnnnnnnnnnnnnnnnnnnnnnnnnnnnnnnnnnnnnnnnnnnnnnnnnnnnnnnnnnnnnnnnnnnnnnnnnnnnnnnnnnnnnnnnnnnnnnnnnnnnnnnnnnnnnnnnnnnnnnnnnnnnnnnnnnnnnnnnnnnnnnnnnnnnnnnnnnnnnnnnnnnnnnnnnnnnnnnnnnnnnnnnnnnnnnnnnnnnnnnnnnnnnnnnnnnnnnnnnnnnnnnnnnnnnnnnnnnnnnnnnnnnnnnnnnnnnnnnnnnnnnnnnnnnnnnnnnnnnnnnnnnnnnnnnnnnnnnnnnnnnnnnnnnnnnnnnnnnnnnnnnnnnnnnnnnnnnnnnnnnnnnnnnnnnnnnnnnnnnnnnnnnnnnnnnnnnnnnnnnnnnnnnnnnnnnnnnnnnnnnnnnnnnnnnnnnnnnnnnnnnnnnnnnnnnnnnnnnnnnnnnnnnnnnnnnnnnnnnnnnnnnnnnnnnnnnnnnnnnnnnnnnnnnnnnnnnnnnnnnnnnnnnnnnnnnnnnnnnnnnnnnnnnnnnnnnnnnnnnnnnnnnnnnnnnnnnnnnnnnnnnnnnnnnnnnnnnnnnnnnnnnnnnnnnnnnnnnnnnnnnnnnnnnnnnnnnnnnnnnnnnnnnnnnnnnnnnnnnnnnnnnnnnnnnnnnnnnnnnnnnnnnnnnnnnnnnnnnnnnnnnnnnnnnnnnnnnnnnnnnnnnnnnnnnnnnnnnnnnnnnnnnnnnnnnnnnnnnnnnnnnnnnnnnnnnnnnnnnnnnnnnnnnnnnnnnnnnnnnnnnnnnnnnnnnnnnnnnnnnnnnnnnnnnnnnnnnnnnnnnnnnnnnnnnnnnnnnnnnnnnnnnnnnnnnnnnnnnnnnnnnnnnnnnnnnnnnnnnnnnnnnnnnnnnnnnnnnnnnnnnnnnnnnnnnnnnnnnnnnnnnnnnnnnnnnnnnnnnnnnnnnnnnnnnnnnnnnnnnnnnnnnnnnnnnnnnnnnnnnnnnnnnnnnnnnnnnnnnnnnnnnnnnnnnnnnnnnnnnnnnnnnnnnnnnnnnnnnnnnnnnnnnnnnnnnnnnnnnnnnnnnnnnnnnnnnnnnnnnnnnnnnnnnnnnnnnnnnnnnnnnnnnnnnnnnnnnnnnnnnnnnnnnnnnnnnnnnnnnnnnnnnnnnnnnnnnnnnnnnnnnnnnnnnnnnnnnnnnnnnnnnnnnnnnnnnnnnnnnnnnnnnnnnnnnnnnnnnnnnnnnnnnnnnnnnnnnnnnnnnnnnnnnnnnnnnnnnnnnnnnnnnnnnnnnnnnnnnnnnnnnnnnnnnnnnnnnnnnnnnnnnnnnnnnnnnnnnnnnnnnnnnnnnnnnnnnnnnnnnnnnnnnnnnnnnnnnnnnnnnnnnnnnnnnnnnnnnnnnnnnnnnnnnnnnnnnnnnnnnnnnnnnnnnnnnnnnnnnnnnnnnnnnnnnnnnnnnnnnnnnnnnnnnnnnnnnnnnnnnnnnnnnnnnnnnnnnnnnnnnnnnnnnnnnnnnnnnnnnnnnnnnnnnnnnnnnnnnnnnnnnnnnnnnnnnnnnnnnnnnnnnnnnnnnnnnnnnnnnnnnnnnnnnnnnnnnnnnnnnnnnnnnnnnnnnnnnnnnnnnnnnnnnnnnnnnnnnnnnnnnnnnnnnnnnnnnnnnnnnnnnnnnnnnnnnnnnnnnnnnnnnnnnnnnnnnnnnnnnnnnnnnnnnnnnnnnnnnnnnnnnnnnnnnnnnnnnnnnnnnnnnnnnnnnnnnnnnnnnnnnnnnnnnnnnnnnnnnnnnnnnnnnnnnnnnnnnnnnnnnnnnnnnnnnnnnnnnnnnnnnnnnnnnnnnnnnnnnnnnnnnnnnnnnnnnnnnnnnnnnnnnnnnnnnnnnnnnnnnnnnnnnnnnnnnnnnnnnnnnnnnnnnnnnnnnnnnnnnnnnnnnnnnnnnnnnnnnnnnnnnnnnnnnnnnnnnnnnnnnnnnnnnnnnnnnnnnnnnnnnnnnnnnnnnnnnnnnnnnnnnnnnnnnnnnnnnnnnnnnnnnnnnnnnnnnnnnnnnnnnnnnnnnnnnnnnnnnnnnnnnnnnnnnnnnnnnnnnnnnnnnnnnnnnnnnnnnnnnnnnnnnnnnnnnnnnnnnnnnnnnnnnnnnnnnnnnnnnnnnnnnnnnnnnnnnnnnnnnnnnnnnnnnnnnnnnnnnnnnnnnnnnnnnnnnnnnnnnnnnnnnnnnnnnnnnnnnnnnnnnnnnnnnnnnnnnnnnnnnnnnnnnnnnnnnnnnnnnnnnnnnnnnnnnnnnnnnnnnnnnnnnnnnnnnnnnnnnnnnnnnnnnnnnnnnnnnnnnnnnnnnnnnnnnnnnnnnnnnnnnnnnnnnnnnnnnnnnnnnnnnnnnnnnnnnnnnnnnnnnnnnnnnnnnnnnnnnnnnnnnnnnnnnnnnnnnnnnnnnnnnnnnnnnnnnnnnnnnnnnnnnnnnnnnnnnnnnnnnnnnnnnnnnnnnnnnnnnnnnnnnnnnnnnnnnnnnnnnnnnnnnnnnnnnnnnnnnnnnnnnnnnnnnnnnnnnnnnnnnnnnnnnnnnnnnnnnnnnnnnnnnnnnnnnnnnnnnnnnnnnnnnnnnnnnnnnnnnnnnnnnnnnnnnnnnnnnnnnnnnnnnnnnnnnnnnnnnnnnnnnnnnnnnnnnnnnnnnnnnnnnnnnnnnnnnnnnnnnnnnnnnnnnnnnnnnnnnnnnnnnnnnnnnnnnnnnnnnnnnnnnnnnnnnnnnnnnnnnnnnnnnnnnnnnnnnnnnnnnnnnnnnnnnnnnnnnnnnnnnnnnnnnnnnnnnnnnnnnnnnnnnnnnnnnnnnnnnnnnnnnnnnnnnnnnnnnnnnnnnnnnnnnnnnnnnnnnnnnnnnnnnnnnnnnnnnnnnnnnnnnnnnnnnnnnnnnnnnnnnnnnnnnnnnnnnnnnnnnnnnnnnnnnnnnnnnnnnnnnnnnnnnnnnnnnnnnnnnnnnnnnnnnnnnnnnnnnnnnnnnnnnnnnnnnnnnnnnnnnnnnnnnnnnnnnnnnnnnnnnnnnnnnnnnnnnnnnnnnnnnnnnnnnnnnnnnnnnnnnnnnnnnnnnnnnnnnnnnnnnnnnnnnnnnnnnnnnnnnnnnnnnnnnnnnnnnnnnnnnnnnnnnnnnnnnnnnnnnnnnnnnnnnnnnnnnnnnnnnnnnnnnnnnnnnnnnnnnnnnnnnnnnnnnnnnnnnnnnnnnnnnnnnnnnnnnnnnnnnnnnnnnnnnnnnnnnnnnnnnnnnnnnnnnnnnnnnnnnnnnnnnnnnnnnnnnnnnnnnnnnnnnnnnnnnnnnnnnnnnnnnnnnnnnnnnnnnnnnnnnnnnnnnnnnnnnnnnnnnnnnnnnnnnnnnnnnnnnnnnnnnnnnnnnnnnnnnnnnnnnnnnnnnnnnnnnnnnnnnnnnnnnnnnnnnnnnnnnnnnnnnnnnnnnnnnnnnnnnnnnnnnnnnnnnnnnnnnnnnnnnnnnnnnnnnnnnnnnnnnnnnnnnnnnnnnnnnnnnnnnnnnnnnnnnnnnnnnnnnnnnnnnnnnnnnnnnnnnnnnnnnnnnnnnnnnnnnnnnnnnnnnnnnnnnnnnnnnnnnnnnnnnnnnnnnnnnnnnnnnnnnnnnnnnnnnnnnnnnnnnnnnnnnnnnnnnnnnnnnnnnnnnnnnnnnnnnnnnnnnnnnnnnnnnnnnnnnnnnnnnnnnnnnnnnnnnnnnnnnnnnnnnnnnnnnnnnnnnnnnnnnnnnnnnnnnnnnnnnnnnnnnnnnnnnnnnnnnnnnnnnnnnnnnnnnnnnnnnnnnnnnnnnnnnnnnnnnnnnnnnnnnnnnnnnnnnnnnnnnnnnnnnnnnnnnnnnnnnnnnnnnnnnnnnnnnnnnnnnnnnnnnnnnnnnnnnnnnnnnnnnnnnnnnnnnnnnnnnnnnnnnnnnnnnnnnnnnnnnnnnnnnnnnnnnnnnnnnnnnnnnnnnnnnnnnnnnnnnnnnnnnnnnnnnnnnnnnnnnnnnnnnnnnnnnnnnnnnnnnnnnnnnnnnnnnnnnnnnnnnnnnnnnnnnnnnnnnnnnnnnnnnnnnnnnnnnnnnnnnnnnnnnnnnnnnnnnnnnnnnnnnnnnnnnnnnnnnnnnnnnnnnnnnnnnnnnnnnnnnnnnnnnnnnnnnnnnnnnnnnnnnnnnnnnnnnnnnnnnnnnnnnnnnnnnnnnnnnnnnnnnnnnnnnnnnnnnnnnnnnnnnnnnnnnnnnnnnnnnnnnnnnnnnnnnnnnnnnnnnnnnnnnnnnnnnnnnnnnnnnnnnnnnnnnnnnnnnnnnnnnnnnnnnnnnnnnnnnnnnnnnnnnnnnnnnnnnnnnnnnnnnnnnnnnnnnnnnnnnnnnnnnnnnnnnnnnnnnnnnnnnnnnnnnnnnnnnnnnnnnnnnnnnnnnnnnnnnnnnnnnnnnnnnnnnnnnnnnnnnnnnnnnnnnnnnnnnnnnnnnnnnnnnnnnnnnnnnnnnnnnnnnnnnnnnnnnnnnnnnnnnnnnnnnnnnnnnnnnnnnnnnnnnnnnnnnnnnnnnnnnnnnnnnnnnnnnnnnnnnnnnnnnnnnnnnnnnnnnnnnnnnnnnnnnnnnnnnnnnnnnnnnnnnnnnnnnnnnnnnnnnnnnnnnnnnnnnnnnnnnnnnnnnnnnnnnnnnnnnnnnnnnnnnnnnnnnnnnnnnnnnnnnnnnnnnnnnnnnnnnnnnnnnnnnnnnnnnnnnnnnnnnnnnnnnnnnnnnnnnnnnnnnnnnnnnnnnnnnnnnnnnnnnnnnnnnnnnnnnnnnnnnnnnnnnnnnnnnnnnnnnnnnnnnnnnnnnnnnnnnnnnnnnnnnnnnnnnnnnnnnnnnnnnnnnnnnnnnnnnnnnnnnnnnnnnnnnnnnnnnnnnnnnnnnnnnnnnnnnnnnnnnnnnnnnnnnnnnnnnnnnnnnnnnnnnnnnnnnnnnnnnnnnnnnnnnnnnnnnnnnnnnnnnnnnnnnnnnnnnnnnnnnnnnnnnnnnnnnnnnnnnnnnnnnnnnnnnnnnnnnnnnnnnnnnnnnnnnnnnnnnnnnnnnnnnnnnnnnnnnnnnnnnnnnnnnnnnnnnnnnnnnnnnnnnnnnnnnnnnnnnnnnnnnnnnnnnnnnnnnnnnnnnnnnnnnnnnnnnnnnnnnnnnnnnnnnnnnnnnnnnnnnnnnnnnnnnnnnnnnnnnnnnnnnnnnnnnnnnnnnnnnnnnnnnnnnnnnnnnnnnnnnnnnnnnnnnnnnnnnnnnnnnnnnnnnnnnnnnnnnnnnnnnnnnnnnnnnnnnnnnnnnnnnnnnnnnnnnnnnnnnnnnnnnnnnnnnnnnnnnnnnnnnnnnnnnnnnnnnnnnnnnnnnnnnnnnnnnnnnnnnnnnnnnnnnnnnnnnnnnnnnnnnnnnnnnnnnnnnnnnnnnnnnnnnnnnnnnnnnnnnnnnnnnnnnnnnnnnnnnnnnnnnnnnnnnnnnnnnnnnnnnnnnnnnnnnnnnnnnnnnnnnnnnnnnnnnnnnnnnnnnnnnnnnnnnnnnnnnnnnnnnnnnnnnnnnnnnnnnnnnnnnnnnnnnnnnnnnnnnnnnnnnnnnnnnnnnnnnnnnnnnnnnnnnnnnnnnnnnnnnnnnnnnnnnnnnnnnnnnnnnnnnnnnnnnnnnnnnnnnnnnnnnnnnnnnnnnnnnnnnnnnnnnnnnnnnnnnnnnnnnnnnnnnnnnnnnnnnnnnnnnnnnnnnnnnnnnnnnnnnnnnnnnnnnnnnnnnnnnnnnnnnnnnnnnnnnnnnnnnnnnnnnnnnnnnnnnnnnnnnnnnnnnnnnnnnnnnnnnnnnnnnnnnnnnnnnnnnnnnnnnnnnnnnnnnnnnnnnnnnnnnnnnnnnnnnnnnnnnnnnnnnnnnnnnnnnnnnnnnnnnnnnnnnnnnnnnnnnnnnnnnnnnnnnnnnnnnnnnnnnnnnnnnnnnnnnnnnnnnnnnnnnnnnnnnnnnnnnnnnnnnnnnnnnnnnnnnnnnnnnnnnnnnnnnnnnnnnnnnnnnnnnnnnnnnnnnnnnnnnnnnnnnnnnnnnnnnnnnnnnnnnnnnnnnnnnnnnnnnnnnnnnnnnnnnnnnnnnnnnnnnnnnnnnnnnnnnnnnnnnnnnnnnnnnnnnnnnnnnnnnnnnnnnnnnnnnnnnnnnnnnnnnnnnnnnnnnnnnnnnnnnnnnnnnnnnnnnnnnnnnnnnnnnnnnnnnnnnnnnnnnnnnnnnnnnnnnnnnnnnnnnnnnnnnnnnnnnnnnnnnnnnnnnnnnnnnnnnnnnnnnnnnnnnnnnnnnnnnnnnnnnnnnnnnnnnnnnnnnnnnnnnnnnnnnnnnnnnnnnnnnnnnnnnnnnnnnnnnnnnnnnnnnnnnnnnnnnnnnnnnnnnnnnnnnnnnnnnnnnnnnnnnnnnnnnnnnnnnnnnnnnnnnnnnnnnnnnnnnnnnnnnnnnnnnnnnnnnnnnnnnnnnnnnnnnnnnnnnnnnnnnnnnnnnnnnnnnnnnnnnnnnnnnnnnnnnnnnnnnnnnnnnnnnnnnnnnnnnnnnnnnnnnnnnnnnnnnnnnnnnnnnnnnnnnnnnnnnnnnnnnnnnnnnnnnnnnnnnnnnnnnnnnnnnnnnnnnnnnnnnnnnnnnnnnnnnnnnnnnnnnnnnnnnnnnnnnnnnnnnnnnnnnnnnnnnnnnnnnnnnnnnnnnnnnnnnnnnnnnnnnnnnnnnnnnnnnnnnnnnnnnnnnnnnnnnnnnnnnnnnnnnnnnnnnnnnnnnnnnnnnnnnnnnnnnnnnnnnnnnnnnnnnnnnnnnnnnnnnnnnnnnnnnnnnnnnnnnnnnnnnnnnnnnnnnnnnnnnnnnnnnnnnnnnnnnnnnnnnnnnnnnnnnnnnnnnnnnnnnnnnnnnnnnnnnnnnnnnnnnnnnnnnnnnnnnnnnnnnnnnnnnnnnnnnnnnnnnnnnnnnnnnnnnnnnnnnnnnnnnnnnnnnnnnnnnnnnnnnnnnnnnnnnnnnnnnnnnnnnnnnnnnnnnnnnnnnnnnnnnnnnnnnnnnnnnnnnnnnnnnnnnnnnnnnnnnnnnnnnnnnnnnnnnnnnnnnnnnnnnnnnnnnnnnnnnnnnnnnnnnnnnnnnnnnnnnnnnnnnnnnnnnnnnnnnnnnnnnnnnnnnnnnnnnnnnnnnnnnnnnnnnnnnnnnnnnnnnnnnnnnnnnnnnnnnnnnnnnnnnnnnnnnnnnnnnnnnnnnnnnnnnnnnnnnnnnnnnnnnnnnnnnnnnnnnnnnnnnnnnnnnnnnnnnnnnnnnnnnnnnnnnnnnnnnnnnnnnnnnnnnnnnnnnnnnnnnnnnnnnnnnnnnnnnnnnnnnnnnnnnnnnnnnnnnnnnnnnnnnnnnnnnnnnnnnnnnnnnnnnnnnnnnnnnnnnnnnnnnnnnnnnnnnnnnnnnnnnnnnnnnnnnnnnnnnnnnnnnnnnnnnnnnnnnnnnnnnnnnnnnnnnnnnnnnnnnnnnnnnnnnnnnnnnnnnnnnnnnnnnnnnnnnnnnnnnnnnnnnnnnnnnnnnnnnnnnnnnnnnnnnnnnnnnnnnnnnnnnnnnnnnnnnnnnnnnnnnnnnnnnnnnnnnnnnnnnnnnnnnnnnnnnnnnnnnnnnnnnnnnnnnnnnnnnnnnnnnnnnnnnnnnnnnnnnnnnnnnnnnnnnnnnnnnnnnnnnnnnnnnnnnnnnnnnnnnnnnnnnnnnnnnnnnnnnnnnnnnnnnnnnnnnnnnnnnnnnnnnnnnnnnnnnnnnnnnnnnnnnnnnnnnnnnnnnnnnnnnnnnnnnnnnnnnnnnnnnnnnnnnnnnnnnnnnnnnnnnnnnnnnnnnnnnnnnnnnnnnnnnnnnnnnnnnnnnnnnnnnnnnnnnnnnnnnnnnnnnnnnnnnnnnnnnnnnnnnnnnnnnnnnnnnnnnnnnnnnnnnnnnnnnnnnnnnnnnnnnnnnnnnnnnnnnnnnnnnnnnnnnnnnnnnnnnnnnnnnnnnnnnnnnnnnnnnnnnnnnnnnnnnnnnnnnnnnnnnnnnnnnnnnnnnnnnnnnnnnnnnnnnnnnnnnnnnnnnnnnnnnnnnnnnnnnnnnnnnnnnnnnnnnnnnnnnnnnnnnnnnnnnnnnnnnnnnnnnnnnnnnnnnnnnnnnnnnnnnnnnnnnnnnnnnnnnnnnnnnnnnnnnnnnnnnnnnnnnnnnnnnnnnnnnnnnnnnnnnnnnnnnnnnnnnnnnnnnnnnnnnnnnnnnnnnnnnnnnnnnnnnnnnnnnnnnnnnnnnnnnnnnnnnnnnnnnnnnnnnnnnnnnnnnnnnnnnnnnnnnnnnnnnnnnnnnnnnnnnnnnnnnnnnnnnnnnnnnnnnnnnnnnnnnnnnnnnnnnnnnnnnnnnnnnnnnnnnnnnnnnnnnnnnnnnnnnnnnnnnnnnnnnnnnnnnnnnnnnnnnnnnnnnnnnnnnnnnnnnnnnnnnnnnnnnnnnnnnnnnnnnnnnnnnnnnnnnnnnnnnnnnnnnnnnnnnnnnnnnnnnnnnnnnnnnnnnnnnnnnnnnnnnnnnnnnnnnnnnnnnnnnnnnnnnnnnnnnnnnnnnnnnnnnnnnnnnnnnnnnnnnnnnnnnnnnnnnnnnnnnnnnnnnnnnnnnnnnnnnnnnnnnnnnnnnnnnnnnnnnnnnnnnnnnnnnnnnnnnnnnnnnnnnnnnnnnnnnnnnnnnnnnnnnnnnnnnnnnnnnnnnnnnnnnnnnnnnnnnnnnnnnnnnnnnnnnnnnnnnnnnnnnnnnnnnnnnnnnnnnnnnnnnnnnnnnnnnnnnnnnnnnnnnnnnnnnnnnnnnnnnnnnnnnnnnnnnnnnnnnnnnnnnnnnnnnnnnnnnnnnnnnnnnnnnnnnnnnnnnnnnnnnnnnnnnnnnnnnnnnnnnnnnnnnnnnnnnnnnnnnnnnnnnnnnnnnnnnnnnnnnnnnnnnnnnnnnnnnnnnnnnnnnnnnnnnnnnnnnnnnnnnnnnnnnnnnnnnnnnnnnnnnnnnnnnnnnnnnnnnnnnnnnnnnnnnnnnnnnnnnnnnnnnnnnnnnnnnnnnnnnnnnnnnnnnnnnnnnnnnnnnnnnnnnnnnnnnnnnnnnnnnnnnnnnnnnnnnnnnnnnnnnnnnnnnnnnnnnnnnnnnnnnnnnnnnnnnnnnnnnnnnnnnnnnnnnnnnnnnnnnnnnnnnnnnnnnnnnnnnnnnnnnnnnnnnnnnnnnnnnnnnnnnnnnnnnnnnnnnnnnnnnnnnnnnnnnnnnnnnnnnnnnnnnnnnnnnnnnnnnnnnnnnnnnnnnnnnnnnnnnnnnnnnnnnnnnnnnnnnnnnnnnnnnnnnnnnnnnnnnnnnnnnnnnnnnnnnnnnnnnnnnnnnnnnnnnnnnnnnnnnnnnnnnnnnnnnnnnnnnnnnnnnnnnnnnnnnnnnnnnnnnnnnnnnnnnnnnnnnnnnnnnnnnnnnnnnnnnnnnnnnnnnnnnnnnnnnnnnnnnnnnnnnnnnnnnnnnnnnnnnnnnnnnnnnnnnnnnnnnnnnnnnnnnnnnnnnnnnnnnnnnnnnnnnnnnnnnnnnnnnnnnnnnnnnnnnnnnnnnnnnnnnnnnnnnnnnnnnnnnnnnnnnnnnnnnnnnnnnnnnnnnnnnnnnnnnnnnnnnnnnnnnnnnnnnnnnnnnnnnnnnnnnnnnnnnnnnnnnnnnnnnnnnnnnnnnnnnnnnnnnnnnnnnnnnnnnnnnnnnnnnnnnnnnnnnnnnnnnnnnnnnnnnnnnnnnnnnnnnnnnnnnnnnnnnnnnnnnnnnnnnnnnnnnnnnnnnnnnnnnnnnnnnnnnnnnnnnnnnnnnnnnnnnnnnnnnnnnnnnnnnnnnnnnnnnnnnnnnnnnnnnnnnnnnnnnnnnnnnnnnnnnnnnnnnnnnnnnnnnnnnnnnnnnnnnnnnnnnnnnnnnnnnnnnnnnnnnnnnnnnnnnnnnnnnnnnnnnnnnnnnnnnnnnnnnnnnnnnnnnnnnnnnnnnnnnnnnnnnnnnnnnnnnnnnnnnnnnnnnnnnnnnnnnnnnnnnnnnnnnnnnnnnnnnnnnnnnnnnnnnnnnnnnnnnnnnnnnnnnnnnnnnnnnnnnnnnnnnnnnnnnnnnnnnnnnnnnnnnnnnnnnnnnnnnnnnnnnnnnnnnnnnnnnnnnnnnnnnnnnnnnnnnnnnnnnnnnnnnnnnnnnnnnnnnnnnnnnnnnnnnnnnnnnnnnnnnnnnnnnnnnnnnnnnnnnnnnnnnnnnnnnnnnnnnnnnnnnnnnnnnnnnnnnnnnnnnnnnnnnnnnnnnnnnnnnnnnnnnnnnnnnnnnnnnnnnnnnnnnnnnnnnnnnnnnnnnnnnnnnnnnnnnnnnnnnnnnnnnnnnnnnnnnnnnnnnnnnnnnnnnnnnnnnnnnnnnnnnnnnnnnnnnnnnnnnnnnnnnnnnnnnnnnnnnnnnnnnnnnnnnnnnnnnnnnnnnnnnnnnnnnnnnnnnnnnnnnnnnnnnnnnnnnnnnnnnnnnnnnnnnnnnnnnnnnnnnnnnnnnnnnnnnnnnnnnnnnnnnnnnnnnnnnnnnnnnnnnnnnnnnnnnnnnnnnnnnnnnnnnnnnnnnnnnnnnnnnnnnnnnnnnnnnnnnnnnnnnnnnnnnnnnnnnnnnnnnnnnnnnnnnnnnnnnnnnnnnnnnnnnnnnnnnnnnnnnnnnnnnnnnnnnnnnnnnnnnnnnnnnnnnnnnnnnnnnnnnnnnnnnnnnnnnnnnnnnnnnnnnnnnnnnnnnnnnnnnnnnnnnnnnnnnnnnnnnnnnnnnnnnnnnnnnnnnnnnnnnnnnnnnnnnnnnnnnnnnnnnnnnnnnnnnnnnnnnnnnnnnnnnnnnnnnnnnnnnnnnnnnnnnnnnnnnnnnnnnnnnnnnnnnnnnnnnnnnnnnnnnnnnnnnnnnnnnnnnnnnnnnnnnnnnnnnnnnnnnnnnnnnnnnnnnnnnnnnnnnnnnnnnnnnnnnnnnnnnnnnnnnnnnnnnnnnnnnnnnnnnnnnnnnnnnnnnnnnnnnnnnnnnnnnnnnnnnnnnnnnnnnnnnnnnnnnnnnnnnnnnnnnnnnnnnnnnnnnnnnnnnnnnnnnnnnnnnnnnnnnnnnnnnnnnnnnnnnnnnnnnnnnnnnnnnnnnnnnnnnnnnnnnnnnnnnnnnnnnnnnnnnnnnnnnnnnnnnnnnnnnnnnnnnnnnnnnnnnnnnnnnnnnnnnnnnnnnnnnnnnnnnnnnnnnnnnnnnnnnnnnnnnnnnnnnnnnnnnnnnnnnnnnnnnnnnnnnnnnnnnnnnnnnnnnnnnnnnnnnnnnnnnnnnnnnnnnnnnnnnnnnnnnnnnnnnnnnnnnnnnnnnnnnnnnnnnnnnnnnnnnnnnnnnnnnnnnnnnnnnnnnnnnnnnnnnnnnnnnnnnnnnnnnnnnnnnnnnnnnnnnnnnnnnnnnnnnnnnnnnnnnnnnnnnnnnnnnnnnnnnnnnnnnnnnnnnnnnnnnnnnnnnnnnnnnnnnnnnnnnnnnnnnnnnnnnnnnnnnnnnnnnnnnnnnnnnnnnnnnnnnnnnnnnnnnnnnnnnnnnnnnnnnnnnnnnnnnnnnnnnnnnnnnnnnnnnnnnnnnnnnnnnnnnnnnnnnnnnnnnnnnnnnnnnnnnnnnnnnnnnnnnnnnnnnnnnnnnnnnnnnnnnnnnnnnnnnnnnnnnnnnnnnnnnnnnnnnnnnnnnnnnnnnnnnnnnnnnnnnnnnnnnnnnnnnnnnnnnnnnnnnnnnnnnnnnnnnnnnnnnnnnnnnnnnnnnnnnnnnnnnnnnnnnnnnnnnnnnnnnnnnnnnnnnnnnnnnnnnnnnnnnnnnnnnnnnnnnnnnnnnnnnnnnnnnnnnnnnnnnnnnnnnnnnnnnnnnnnnnnnnnnnnnnnnnnnnnnnnnnnnnnnnnnnnnnnnnnnnnnnnnnnnnnnnnnnnnnnnnnnnnnnnnnnnnnnnnnnnnnnnnnnnnnnnnnnnnnnnnnnnnnnnnnnnnnnnnnnnnnnnnnnnnnnnnnnnnnnnnnnnnnnnnnnnnnnnnnnnnnnnnnnnnnnnnnnnnnnnnnnnnnnnnnnnnnnnnnnnnnnnnnnnnnnnnnnnnnnnnnnnnnnnnnnnnnnnnnnnnnnnnnnnnnnnnnnnnnnnnnnnnnnnnnnnnnnnnnnnnnnnnnnnnnnnnnnnnnnnnnnnnnnnnnnnnnnnnnnnnnnnnnnnnnnnnnnnnnnnnnnnnnnnnnnnnnnnnnnnnnnnnnnnnnnnnnnnnnnnnnnnnnnnnnnnnnnnnnnnnnnnnnnnnnnnnnnnnnnnnnnnnnnnnnnnnnnnnnnnnnnnnnnnnnnnnnnnnnnnnnnnnnnnnnnnnnnnnnnnnnnnnnnnnnnnnnnnnnnnnnnnnnnnnnnnnnnnnnnnnnnnnnnnnnnnnnnnnnnnnnnnnnnnnnnnnnnnnnnnnnnnnnnnnnnnnnnnnnnnnnnnnnnnnnnnnnnnnnnnnnnnnnnnnnnnnnnnnnnnnnnnnnnnnnnnnnnnnnnnnnnnnnnnnnnnnnnnnnnnnnnnnnnnnnnnnnnnnnnnnnnnnnnnnnnnnnnnnnnnnnnnnnnnnnnnnnnnnnnnnnnnnnnnnnnnnnnnnnnnnnnnnnnnnnnnnnnnnnnnnnnnnnnnnnnnnnnnnnnnnnnnnnnnnnnnnnnnnnnnnnnnnnnnnnnnnnnnnnnnnnnnnnnnnnnnnnnnnnnnnnnnnnnnnnnnnnnnnnnnnnnnnnnnnnnnnnnnnnnnnnnnnnnnnnnnnnnnnnnnnnnnnnnnnnnnnnnnnnnnnnnnnnnnnnnnnnnnnnnnnnnnnnnnnnnnnnnnnnnnnnnnnnnnnnnnnnnnnnnnnnnnnnnnnnnnnnnnnnnnnnnnnnnnnnnnnnnnnnnnnnnnnnnnnnnnnnnnnnnnnnnnnnnnnnnnnnnnnnnnnnnnnnnnnnnnnnnnnnnnnnnnnnnnnnnnnnnnnnnnnnnnnnnnnnnnnnnnnnnnnnnnnnnnnnnnnnnnnnnnnnnnnnnnnnnnnnnnnnnnnnnnnnnnnnnnnnnnnnnnnnnnnnnnnnnnnnnnnnnnnnnnnnnnnnnnnnnnnnnnnnnnnnnnnnnnnnnnnnnnnnnnnnnnnnnnnnnnnnnnnnnnnnnnnnnnnnnnnnnnnnnnnnnnnnnnnnnnnnnnnnnnnnnnnnnnnnnnnnnnnnnnnnnnnnnnnnnnnnnnnnnnnnnnnnnnnnnnnnnnnnnnnnnnnnnnnnnnnnnnnnnnnnnnnnnnnnnnnnnnnnnnnnnnnnnnnnnnnnnnnnnnnnnnnnnnnnnnnnnnnnnnnnnnnnnnnnnnnnnnnnnnnnnnnnnnnnnnnnnnnnnnnnnnnnnnnnnnnnnnnnnnnnnnnnnnnnnnnnnnnnnnnnnnnnnnnnnnnnnnnnnnnnnnnnnnnnnnnnnnnnnnnnnnnnnnnnnnnnnnnnnnnnnnnnnnnnnnnnnnnnnnnnnnnnnnnnnnnnnnnnnnnnnnnnnnnnnnnnnnnnnnnnnnnnnnnnnnnnnnnnnnnnnnnnnnnnnnnnnnnnnnnnnnnnnnnnnnnnnnnnnnnnnnnnnnnnnnnnnnnnnnnnnnnnnnnnnnnnnnnnnnnnnnnnnnnnnnnnnnnnnnnnnnnnnnnnnnnnnnnnnnnnnnnnnnnnnnnnnnnnnnnnnnnnnnnnnnnnnnnnnnnnnnnnnnnnnnnnnnnnnnnnnnnnnnnnnnnnnnnnnnnnnnnnnnnnnnnnnnnnnnnnnnnnnnnnnnnnnnnnnnnnnnnnnnnnnnnnnnnnnnnnnnnnnnnnnnnnnnnnnnnnnnnnnnnnnnnnnnnnnnnnnnnnnnnnnnnnnnnnnnnnnnnnnnnnnnnnnnnnnnnnnnnnnnnnnnnnnnnnnnnnnnnnnnnnnnnnnnnnnnnnnnnnnnnnnnnnnnnnnnnnnnnnnnnnnnnnnnnnnnnnnnnnnnnnnnnnnnnnnnnnnnnnnnnnnnnnnnnnnnnnnnnnnnnnnnnnnnnnnnnnnnnnnnnnnnnnnnnnnnnnnnnnnnnnnnnnnnnnnnnnnnnnnnnnnnnnnnnnnnnnnnnnnnnnnnnnnnnnnnnnnnnnnnnnnnnnnnnnnnnnnnnnnnnnnnnnnnnnnnnnnnnnnnnnnnnnnnnnnnnnnnnnnnnnnnnnnnnnnnnnnnnnnnnnnnnnnnnnnnnnnnnnnnnnnnnnnnnnnnnnnnnnnnnnnnnnnnnnnnnnnnnnnnnnnnnnnnnnnnnnnnnnnnnnnnnnnnnnnnnnnnnnnnnnnnnnnnnnnnnnnnnnnnnnnnnnnnnnnnnnnnnnnnnnnnnnnnnnnnnnnnnnnnnnnnnnnnnnnnnnnnnnnnnnnnnnnnnnnnnnnnnnnnnnnnnnnnnnnnnnnnnnnnnnnnnnnnnnnnnnnnnnnnnnnnnnnnnnnnnnnnnnnnnnnnnnnnnnnnnnnnnnnnnnnnnnnnnnnnnnnnnnnnnnnnnnnnnnnnnnnnnnnnnnnnnnnnnnnnnnnnnnnnnnnnnnnnnnnnnnnnnnnnnnnnnnnnnnnnnnnnnnnnnnnnnnnnnnnnnnnnnnnnnnnnnnnnnnnnnnnnnnnnnnnnnnnnnnnnnnnnnnnnnnnnnnnnnnnnnnnnnnnnnnnnnnnnnnnnnnnnnnnnnnnnnnnnnnnnnnnnnnnnnnnnnnnnnnnnnnnnnnnnnnnnnnnnnnnnnnnnnnnnnnnnnnnnnnnnnnnnnnnnnnnnnnnnnnnnnnnnnnnnnnnnnnnnnnnnnnnnnnnnnnnnnnnnnnnnnnnnnnnnnnnnnnnnnnnnnnnnnnnnnnnnnnnnnnnnnnnnnnnnnnnnnnnnnnnnnnnnnnnnnnnnnnnnnnnnnnnnnnnnnnnnnnnnnnnnnnnnnnnnnnnnnnnnnnnnnnnnnnnnnnnnnnnnnnnnnnnnnnnnnnnnnnnnnnnnnnnnnnnnnnnnnnnnnnnnnnnnnnnnnnnnnnnnnnnnnnnnnnnnnnnnnnnnnnnnnnnnnnnnnnnnnnnnnnnnnnnnnnnnnnnnnnnnnnnnnnnnnnnnnnnnnnnnnnnnnnnnnnnnnnnnnnnnnnnnnnnnnnnnnnnnnnnnnnnnnnnnnnnnnnnnnnnnnnnnnnnnnnnnnnnnnnnnnnnnnnnnnnnnnnnnnnnnnnnnnnnnnnnnnnnnnnnnnnnnnnnnnnnnnnnnnnnnnnnnnnnnnnnnnnnnnnnnnnnnnnnnnnnnnnnnnnnnnnnnnnnnnnnnnnnnnnnnnnnnnnnnnnnnnnnnnnnnnnnnnnnnnnnnnnnnnnnnnnnnnnnnnnnnnnnnnnnnnnnnnnnnnnnnnnnnnnnnnnnnnnnnnnnnnnnnnnnnnnnnnnnnnnnnnnnnnnnnnnnnnnnnnnnnnnnnnnnnnnnnnnnnnnnnnnnnnnnnnnnnnnnnnnnnnnnnnnnnnnnnnnnnnnnnnnnnnnnnnnnnnnnnnnnnnnnnnnnnnnnnnnnnnnnnnnnnnnnnnnnnnnnnnnnnnnnnnnnnnnnnnnnnnnnnnnnnnnnnnnnnnnnnnnnnnnnnnnnnnnnnnnnnnnnnnnnnnnnnnnnnnnnnnnnnnnnnnnnnnnnnnnnnnnnnnnnnnnnnnnnnnnnnnnnnnnnnnnnnnnnnnnnnnnnnnnnnnnnnnnnnnnnnnnnnnnnnnnnnnnnnnnnnnnnnnnnnnnnnnnnnnnnnnnnnnnnnnnnnnnnnnnnnnnnnnnnnnnnnnnnnnnnnnnnnnnnnnnnnnnnnnnnnnnnnnnnnnnnnnnnnnnnnnnnnnnnnnnnnnnnnnnnnnnnnnnnnnnnnnnnnnnnnnnnnnnnnnnnnnnnnnnnnnnnnnnnnnnnnnnnnnnnnnnnnnnnnnnnnnnnnnnnnnnnnnnnnnnnnnnnnnnnnnnnnnnnnnnnnnnnnnnnnnnnnnnnnnnnnnnnnnnnnnnnnnnnnnnnnnnnnnnnnnnnnnnnnnnnnnnnnnnnnnnnnnnnnnnnnnnnnnnnnnnnnnnnnnnnnnnnnnnnnnnnnnnnnnnnnnnnnnnnnnnnnnnnnnnnnnnnnnnnnnnnnnnnnnnnnnnnnnnnnnnnnnnnnnnnnnnnnnnnnnnnnnnnnnnnnnnnnnnnnnnnnnnnnnnnnnnnnnnnnnnnnnnnnnnnnnnnnnnnnnnnnnnnnnnnnnnnnnnnnnnnnnnnnnnnnnnnnnnnnnnnnnnnnnnnnnnnnnnnnnnnnnnnnnnnnnnnnnnnnnnnnnnnnnnnnnnnnnnnnnnnnnnnnnnnnnnnnnnnnnnnnnnnnnnnnnnnnnnnnnnnnnnnnnnnnnnnnnnnnnnnnnnnnnnnnnnnnnnnnnnnnnnnnnnnnnnnnnnnnnnnnnnnnnnnnnnnnnnnnnnnnnnnnnnnnnnnnnnnnnnnnnnnnnnnnnnnnnnnnnnnnnnnnnnnnnnnnnnnnnnnnnnnnnnnnnnnnnnnnnnnnnnnnnnnnnnnnnnnnnnnnnnnnnnnnnnnnnnnnnnnnnnnnnnnnnnnnnnnnnnnnnnnnnnnnnnnnnnnnnnnnnnnnnnnnnnnnnnnnnnnnnnnnnnnnnnnnnnnnnnnnnnnnnnnnnnnnnnnnnnnnnnnnnnnnnnnnnnnnnnnnnnnnnnnnnnnnnnnnnnnnnnnnnnnnnnnnnnnnnnnnnnnnnnnnnnnnnnnnnnnnnnnnnnnnnnnnnnnnnnnnnnnnnnnnnnnnnnnnnnnnnnnnnnnnnnnnnnnnnnnnnnnnnnnnnnnnnnnnnnnnnnnnnnnnnnnnnnnnnnnnnnnnnnnnnnnnnnnnnnnnnnnnnnnnnnnnnnnnnnnnnnnnnnnnnnnnnnnnnnnnnnnnnnnnnnnnnnnnnnnnnnnnnnnnnnnnnnnnnnnnnnnnnnnnnnnnnnnnnnnnnnnnnnnnnnnnnnnnnnnnnnnnnnnnnnnnnnnnnnnnnnnnnnnnnnnnnnnnnnnnnnnnnnnnnnnnnnnnnnnnnnnnnnnnnnnnnnnnnnnnnnnnnnnnnnnnnnnnnnnnnnnnnnnnnnnnnnnnnnnnnnnnnnnnnnnnnnnnnnnnnnnnnnnnnnnnnnnnnnnnnnnnnnnnnnnnnnnnnnnnnnnnnnnnnnnnnnnnnnnnnnnnnnnnnnnnnnnnnnnnnnnnnnnnnnnnnnnnnnnnnnnnnnnnnnnnnnnnnnnnnnnnnnnnnnnnnnnnnnnnnnnnnnnnnnnnnnnnnnnnnnnnnnnnnnnnnnnnnnnnnnnnnnnnnnnnnnnnnnnnnnnnnnnnnnnnnnnnnnnnnnnnnnnnnnnnnnnnnnnnnnnnnnnnnnnnnnnnnnnnnnnnnnnnnnnnnnnnnnnnnnnnnnnnnnnnnnnnnnnnnnnnnnnnnnnnnnnnnnnnnnnnnnnnnnnnnnnnnnnnnnnnnnnnnnnnnnnnnnnnnnnnnnnnnnnnnnnnnnnnnnnnnnnnnnnnnnnnnnnnnnnnnnnnnnnnnnnnnnnnnnnnnnnnnnnnnnnnnnnnnnnnnnnnnnnnnnnnnnnnnnnnnnnnnnnnnnnnnnnnnnnnnnnnnnnnnnnnnnnnnnnnnnnnnnnnnnnnnnnnnnnnnnnnnnnnnnnnnnnnnnnnnnnnnnnnnnnnnnnnnnnnnnnnnnnnnnnnnnnnnnnnnnnnnnnnnnnnnnnnnnnnnnnnnnnnnnnnnnnnnnnnnnnnnnnnnnnnnnnnnnnnnnnnnnnnnnnnnnnnnnnnnnnnnnnnnnnnnnnnnnnnnnnnnnnnnnnnnnnnnnnnnnnnnnnnnnnnnnnnnnnnnnnnnnnnnnnnnnnnnnnnnnnnnnnnnnnnnnnnnnnnnnnnnnnnnnnnnnnnnnnnnnnnnnnnnnnnnnnnnnnnnnnnnnnnnnnnnnnnnnnnnnnnnnnnnnnnnnnnnnnnnnnnnnnnnnnnnnnnnnnnnnnnnnnnnnnnnnnnnnnnnnnnnnnnnnnnnnnnnnnnnnnnnnnnnnnnnnnnnnnnnnnnnnnnnnnnnnnnnnnnnnnnnnnnnnnnnnnnnnnnnnnnnnnnnnnnnnnnnnnnnnnnnnnnnnnnnnnnnnnnnnnnnnnnnnnnnnnnnnnnnnnnnnnnnnnnnnnnnnnnnnnnnnnnnnnnnnnnnnnnnnnnnnnnnnnnnnnnnnnnnnnnnnnnnnnnnnnnnnnnnnnnnnnnnnnnnnnnnnnnnnnnnnnnnnnnnnnnnnnnnnnnnnnnnnnnnnnnnnnnnnnnnnnnnnnnnnnnnnnnnnnnnnnnnnnnnnnnnnnnnnnnnnnnnnnnnnnnnnnnnnnnnnnnnnnnnnnnnnnnnnnnnnnnnnnnnnnnnnnnnnnnnnnnnnnnnnnnnnnnnnnnnnnnnnnnnnnnnnnnnnnnnnnnnnnnnnnnnnnnnnnnnnnnnnnnnnnnnnnnnnnnnnnnnnnnnnnnnnnnnnnnnnnnnnnnnnnnnnnnnnnnnnnnnnnnnnnnnnnnnnnnnnnnnnnnnnnnnnnnnnnnnnnnnnnnnnnnnnnnnnnnnnnnnnnnnnnnnnnnnnnnnnnnnnnnnnnnnnnnnnnnnnnnnnnnnnnnnnnnnnnnnnnnnnnnnnnnnnnnnnnnnnnnnnnnnnnnnnnnnnnnnnnnnnnnnnnnnnnnnnnnnnnnnnnnnnnnnnnnnnnnnnnnnnnnnnnnnnnnnnnnnnnnnnnnnnnnnnnnnnnnnnnnnnnnnnnnnnnnnnnnnnnnnnnnnnnnnnnnnnnnnnnnnnnnnnnnnnnnnnnnnnnnnnnnnnnnnnnnnnnnnnnnnnnnnnnnnnnnnnnnnnnnnnnnnnnnnnnnnnnnnnnnnnnnnnnnnnnnnnnnnnnnnnnnnnnnnnnnnnnnnnnnnnnnnnnnnnnnnnnnnnnnnnnnnnnnnnnnnnnnnnnnnnnnnnnnnnnnnnnnnnnnnnnnnnnnnnnnnnnnnnnnnnnnnnnnnnnnnnnnnnnnnnnnnnnnnnnnnnnnnnnnnnnnnnnnnnnnnnnnnnnnnnnnnnnnnnnnnnnnnnnnnnnnnnnnnnnnnnnnnnnnnnnnnnnnnnnnnnnnnnnnnnnnnnnnnnnnnnnnnnnnnnnnnnnnnnnnnnnnnnnnnnnnnnnnnnnnnnnnnnnnnnnnnnnnnnnnnnnnnnnnnnnnnnnnnnnnnnnnnnnnnnnnnnnnnnnnnnnnnnnnnnnnnnnnnnnnnnnnnnnnnnnnnnnnnnnnnnnnnnnnnnnnnnnnnnnnnnnnnnnnnnnnnnnnnnnnnnnnnnnnnnnnnnnnnnnnnnnnnnnnnnnnnnnnnnnnnnnnnnnnnnnnnnnnnnnnnnnnnnnnnnnnnnnnnnnnnnnnnnnnnnnnnnnnnnnnnnnnnnnnnnnnnnnnnnnnnnnnnnnnnnnnnnnnnnnnnnnnnnnnnnnnnnnnnnnnnnnnnnnnnnnnnnnnnnnnnnnnnnnnnnnnnnnnnnnnnnnnnnnnnnnnnnnnnnnnnnnnnnnnnnnnnnnnnnnnnnnnnnnnnnnnnnnnnnnnnnnnnnnnnnnnnnnnnnnnnnnnnnnnnnnnnnnnnnnnnnnnnnnnnnnnnnnnnnnnnnnnnnnnnnnnnnnnnnnnnnnnnnnnnnnnnnnnnnnnnnnnnnnnnnnnnnnnnnnnnnnnnnnnnnnnnnnnnnnnnnnnnnnnnnnnnnnnnnnnnnnnnnnnnnnnnnnnnnnnnnnnnnnnnnnnnnnnnnnnnnnnnnnnnnnnnnnnnnnnnnnnnnnnnnnnnnnnnnnnnnnnnnnnnnnnnnnnnnnnnnnnnnnnnnnnnnnnnnnnnnnnnnnnnnnnnnnnnnnnnnnnnnnnnnnnnnnnnnnnnnnnnnnnnnnnnnnnnnnnnnnnnnnnnnnnnnnnnnnnnnnnnnnnnnnnnnnnnnnnnnnnnnnnnnnnnnnnnnnnnnnnnnnnnnnnnnnnnnnnnnnnnnnnnnnnnnnnnnnnnnnnnnnnnnnnnnnnnnnnnnnnnnnnnnnnnnnnnnnnnnnnnnnnnnnnnnnnnnnnnnnnnnnnnnnnnnnnnnnnnnnnnnnnnnnnnnnnnnnnnnnnnnnnnnnnnnnnnnnnnnnnnnnnnnnnnnnnnnnnnnnnnnnnnnnnnnnnnnnnnnnnnnnnnnnnnnnnnnnnnnnnnnnnnnnnnnnnnnnnnnnnnnnnnnnnnnnnnnnnnnnnnnnnnnnnnnnnnnnnnnnnnnnnnnnnnnnnnnnnnnnnnnnnnnnnnnnnnnnnnnnnnnnnnnnnnnnnnnnnnnnnnnnnnnnnnnnnnnnnnnnnnnnnnnnnnnnnnnnnnnnnnnnnnnnnnnnnnnnnnnnnnnnnnnnnnnnnnnnnnnnnnnnnnnnnnnnnnnnnnnnnnnnnnnnnnnnnnnnnnnnnnnnnnnnnnnnnnnnnnnnnnnnnnnnnnnnnnnnnnnnnnnnnnnnnnnnnnnnnnnnnnnnnnnnnnnnnnnnnnnnnnnnnnnnnnnnnnnnnnnnnnnnnnnnnnnnnnnnnnnnnnnnnnnnnnnnnnnnnnnnnnnnnnnnnnnnnnnnnnnnnnnnnnnnnnnnnnnnnnnnnnnnnnnnnnnnnnnnnnnnnnnnnnnnnnnnnnnnnnnnnnnnnnnnnnnnnnnnnnnnnnnnnnnnnnnnnnnnnnnnnnnnnnnnnnnnnnnnnnnnnnnnnnnnnnnnnnnnnnnnnnnnnnnnnnnnnnnnnnnnnnnnnnnnnnnnnnnnnnnnnnnnnnnnnnnnnnnnnnnnnnnnnnnnnnnnnnnnnnnnnnnnnnnnnnnnnnnnnnnnnnnnnnnnnnnnnnnnnnnnnnnnnnnnnnnnnnnnnnnnnnnnnnnnnnnnnnnnnnnnnnnnnnnnnnnnnnnnnnnnnnnnnnnnnnnnnnnnnnnnnnnnnnnnnnnnnnnnnnnnnnnnnnnnnnnnnnnnnnnnnnnnnnnnnnnnnnnnnnnnnnnnnnnnnnnnnnnnnnnnnnnnnnnnnnnnnnnnnnnnnnnnnnnnnnnnnnnnnnnnnnnnnnnnnnnnnnnnnnnnnnnnnnnnnnnnnnnnnnnnnnnnnnnnnnnnnnnnnnnnnnnnnnnnnnnnnnnnnnnnnnnnnnnnnnnnnnnnnnnnnnnnnnnnnnnnnnnnnnnnnnnnnnnnnnnnnnnnnnnnnnnnnnnnnnnnnnnnnnnnnnnnnnnnnnnnnnnnnnnnnnnnnnnnnnnnnnnnnnnnnnnnnnnnnnnnnnnnnnnnnnnnnnnnnnnnnnnnnnnnnnnnnnnnnnnnnnnnnnnnnnnnnnnnnnnnnnnnnnnnnnnnnnnnnnnnnnnnnnnnnnnnnnnnnnnnnnnnnnnnnnnnnnnnnnnnnnnnnnnnnnnnnnnnnnnnnnnnnnnnnnnnnnnnnnnnnnnnnnnnnnnnnnnnnnnnnnnnnnnnnnnnnnnnnnnnnnnnnnnnnnnnnnnnnnnnnnnnnnnnnnnnnnnnnnnnnnnnnnnnnnnnnnnnnnnnnnnnnnnnnnnnnnnnnnnnnnnnnnnnnnnnnnnnnnnnnnnnnnnnnnnnnnnnnnnnnnnnnnnnnnnnnnnnnnnnnnnnnnnnnnnnnnnnnnnnnnnnnnnnnnnnnnnnnnnnnnnnnnnnnnnnnnnnnnnnnnnnnnnnnnnnnnnnnnnnnnnnnnnnnnnnnnnnnnnnnnnnnnnnnnnnnnnnnnnnnnnnnnnnnnnnnnnnnnnnnnnnnnnnnnnnnnnnnnnnnnnnnnnnnnnnnnnnnnnnnnnnnnnnnnnnnnnnnnnnnnnnnnnnnnnnnnnnnnnnnnnnnnnnnnnnnnnnnnnnnnnnnnnnnnnnnnnnnnnnnnnnnnnnnnnnnnnnnnnnnnnnnnnnnnnnnnnnnnnnnnnnnnnnnnnnnnnnnnnnnnnnnnnnnnnnnnnnnnnnnnnnnnnnnnnnnnnnnnnnnnnnnnnnnnnnnnnnnnnnnnnnnnnnnnnnnnnnnnnnnnnnnnnnnnnnnnnnnnnnnnnnnnnnnnnnnnnnnnnnnnnnnnnnnnnnnnnnnnnnnnnnnnnnnnnnnnnnnnnnnnnnnnnnnnnnnnnnnnnnnnnnnnnnnnnnnnnnnnnnnnnnnnnnnnnnnnnnnnnnnnnnnnnnnnnnnnnnnnnnnnnnnnnnnnnnnnnnnnnnnnnnnnnnnnnnnnnnnnnnnnnnnnnnnnnnnnnnnnnnnnnnnnnnnnnnnnnnnnnnnnnnnnnnnnnnnnnnnnnnnnnnnnnnnnnnnnnnnnnnnnnnnnnnnnnnnnnnnnnnnnnnnnnnnnnnnnnnnnnnnnnnnnnnnnnnnnnnnnnnnnnnnnnnnnnnnnnnnnnnnnnnnnnnnnnnnnnnnnnnnnnnnnnnnnnnnnnnnnnnnnnnnnnnnnnnnnnnnnnnnnnnnnnnnnnnnnnnnnnnnnnnnnnnnnnnnnnnnnnnnnnnnnnnnnnnnnnnnnnnnnnnnnnnnnnnnnnnnnnnnnnnnnnnnnnnnnnnnnnnnnnnnnnnnnnnnnnnnnnnnnnnnnnnnnnnnnnnnnnnnnnnnnnnnnnnnnnnnnnnnnnnnnnnnnnnnnnnnnnnnnnnnnnnnnnnnnnnnnnnnnnnnnnnnnnnnnnnnnnnnnnnnnnnnnnnnnnnnnnnnnnnnnnnnnnnnnnnnnnnnnnnnnnnnnnnnnnnnnnnnnnnnnnnnnnnnnnnnnnnnnnnnnnnnnnnnnnnnnnnnnnnnnnnnnnnnnnnnnnnnnnnnnnnnnnnnnnnnnnnnnnnnnnnnnnnnnnnnnnnnnnnnnnnnnnnnnnnnnnnnnnnnnnnnnnnnnnnnnnnnnnnnnnnnnnnnnnnnnnnnnnnnnnnnnnnnnnnnnnnnnnnnnnnnnnnnnnnnnnnnnnnnnnnnnnnnnnnnnnnnnnnnnnnnnnnnnnnnnnnnnnnnnnnnnnnnnnnnnnnnnnnnnnnnnnnnnnnnnnnnnnnnnnnnnnnnnnnnnnnnnnnnnnnnnnnnnnnnnnnnnnnnnnnnnnnnnnnnnnnnnnnnnnnnnnnnnnnnnnnnnnnnnnnnnnnnnnnnnnnnnnnnnnnnnnnnnnnnnnnnnnnnnnnnnnnnnnnnnnnnnnnnnnnnnnnnnnnnnnnnnnnnnnnnnnnnnnnnnnnnnnnnnnnnnnnnnnnnnnnnnnnnnnnnnnnnnnnnnnnnnnnnnnnnnnnnnnnnnnnnnnnnnnnnnnnnnnnnnnnnnnnnnnnnnnnnnnnnnnnnnnnnnnnnnnnnnnnnnnnnnnnnnnnnnnnnnnnnnnnnnnnnnnnnnnnnnnnnnnnnnnnnnnnnnnnnnnnnnnnnnnnnnnnnnnnnnnnnnnnnnnnnnnnnnnnnnnnnnnnnnnnnnnnnnnnnnnnnnnnnnnnnnnnnnnnnnnnnnnnnnnnnnnnnnnnnnnnnnnnnnnnnnnnnnnnnnnnnnnnnnnnnnnnnnnnnnnnnnnnnnnnnnnnnnnnnnnnnnnnnnnnnnnnnnnnnnnnnnnnnnnnnnnnnnnnnnnnnnnnnnnnnnnnnnnnnnnnnnnnnnnnnnnnnnnnnnnnnnnnnnnnnnnnnnnnnnnnnnnnnnnnnnnnnnnnnnnnnnnnnnnnnnnnnnnnnnnnnnnnnnnnnnnnnnnnnnnnnnnnnnnnnnnnnnnnnnnnnnnnnnnnnnnnnnnnnnnnnnnnnnnnnnnnnnnnnnnnnnnnnnnnnnnnnnnnnnnnnnnnnnnnnnnnnnnnnnnnnnnnnnnnnnnnnnnnnnnnnnnnnnnnnnnnnnnnnnnnnnnnnnnnnnnnnnnnnnnnnnnnnnnnnnnnnnnnnnnnnnnnnnnnnnnnnnnnnnnnnnnnnnnnnnnnnnnnnnnnnnnnnnnnnnnnnnnnnnnnnnnnnnnnnnnnnnnnnnnnnnnnnnnnnnnnnnnnnnnnnnnnnnnnnnnnnnnnnnnnnnnnnnnnnnnnnnnnnnnnnnnnnnnnnnnnnnnnnnnnnnnnnnnnnnnnnnnnnnnnnnnnnnnnnnnnnnnnnnnnnnnnnnnnnnnnnnnnnnnnnnnnnnnnnnnnnnnnnnnnnnnnnnnnnnnnnnnnnnnnnnnnnnnnnnnnnnnnnnnnnnnnnnnnnnnnnnnnnnnnnnnnnnnnnnnnnnnnnnnnnnnnnnnnnnnnnnnnnnnnnnnnnnnnnnnnnnnnnnnnnnnnnnnnnnnnnnnnnnnnnnnnnnnnnnnnnnnnnnnnnnnnnnnnnnnnnnnnnnnnnnnnnnnnnnnnnnnnnnnnnnnnnnnnnnnnnnnnnnnnnnnnnnnnnnnnnnnnnnnnnnnnnnnnnnnnnnnnnnnnnnnnnnnnnnnnnnnnnnnnnnnnnnnnnnnnnnnnnnnnnnnnnnnnnnnnnnnnnnnnnnnnnnnnnnnnnnnnnnnnnnnnnnnnnnnnnnnnnnnnnnnnnnnnnnnnnnnnnnnnnnnnnnnnnnnnnnnnnnnnnnnnnnnnnnnnnnnnnnnnnnnnnnnnnnnnnnnnnnnnnnnnnnnnnnnnnnnnnnnnnnnnnnnnnnnnnnnnnnnnnnnnnnnnnnnnnnnnnnnnnnnnnnnnnnnnnnnnnnnnnnnnnnnnnnnnnnnnnnnnnnnnnnnnnnnnnnnnnnnnnnnnnnnnnnnnnnnnnnnnnnnnnnnnnnnnnnnnnnnnnnnnnnnnnnnnnnnnnnnnnnnnnnnnnnnnnnnnnnnnnnnnnnnnnnnnnnnnnnnnnnnnnnnnnnnnnnnnnnnnnnnnnnnnnnnnnnnnnnnnnnnnnnnnnnnnnnnnnnnnnnnnnnnnnnnnnnnnnnnnnnnnnnnnnnnnnnnnnnnnnnnnnnnnnnnnnnnnnnnnnnnnnnnnnnnnnnnnnnnnnnnnnnnnnnnnnnnnnnnnnnnnnnnnnnnnnnnnnnnnnnnnnnnnnnnnnnnnnnnnnnnnnnnnnnnnnnnnnnnnnnnnnnnnnnnnnnnnnnnnnnnnnnnnnnnnnnnnnnnnnnnnnnnnnnnnnnnnnnnnnnnnnnnnnnnnnnnnnnnnnnnnnnnnnnnnnnnnnnnnnnnnnnnnnnnnnnnnnnnnnnnnnnnnnnnnnnnnnnnnnnnnnnnnnnnnnnnnnnnnnnnnnnnnnnnnnnnnnnnnnnnnnnnnnnnnnnnnnnnnnnnnnnnnnnnnnnnnnnnnnnnnnnnnnnnnnnnnnnnnnnnnnnnnnnnnnnnnnnnnnnnnnnnnnnnnnnnnnnnnnnnnnnnnnnnnnnnnnnnnnnnnnnnnnnnnnnnnnnnnnnnnnnnnnnnnnnnnnnnnnnnnnnnnnnnnnnnnnnnnnnnnnnnnnnnnnnnnnnnnnnnnnnnnnnnnnnnnnnnnnnnnnnnnnnnnnnnnnnnnnnnnnnnnnnnnnnnnnnnnnnnnnnnnnnnnnnnnnnnnnnnnnnnnnnnnnnnnnnnnnnnnnnnnnnnnnnnnnnnnnnnnnnnnnnnnnnnnnnnnnnnnnnnnnnnnnnnnnnnnnnnnnnnnnnnnnnnnnnnnnnnnnnnnnnnnnnnnnnnnnnnnnnnnnnnnnnnnnnnnnnnnnnnnnnnnnnnnnnnnnnnnnnnnnnnnnnnnnnnnnnnnnnnnnnnnnnnnnnnnnnnnnnnnnnnnnnnnnnnnnnnnnnnnnnnnnnnnnnnnnnnnnnnnnnnnnnnnnnnnnnnnnnnnnnnnnnnnnnnnnnnnnnnnnnnnnnnnnnnnnnnnnnnnnnnnnnnnnnnnnnnnnnnnnnnnnnnnnnnnnnnnnnnnnnnnnnnnnnnnnnnnnnnnnnnnnnnnnnnnnnnnnnnnnnnnnnnnnnnnnnnnnnnnnnnnnnnnnnnnnnnnnnnnnnnnnnnnnnnnnnnnnnnnnnnnnnnnnnnnnnnnnnnnnnnnnnnnnnnnnnnnnnnnnnnnnnnnnnnnnnnnnnnnnnnnnnnnnnnnnnnnnnnnnnnnnnnnnnnnnnnnnnnnnnnnnnnnnnnnnnnnnnnnnnnnnnnnnnnnnnnnnnnnnnnnnnnnnnnnnnnnnnnnnnnnnnnnnnnnnnnnnnnnnnnnnnnnnnnnnnnnnnnnnnnnnnnnnnnnnnnnnnnnnnnnnnnnnnnnnnnnnnnnnnnnnnnnnnnnnnnnnnnnnnnnnnnnnnnnnnnnnnnnnnnnnnnnnnnnnnnnnnnnnnnnnnnnnnnnnnnnnnnnnnnnnnnnnnnnnnnnnnnnnnnnnnnnnnnnnnnnnnnnnnnnnnnnnnnnnnnnnnnnnnnnnnnnnnnnnnnnnnnnnnnnnnnnnnnnnnnnnnnnnnnnnnnnnnnnnnnnnnnnnnnnnnnnnnnnnnnnnnnnnnnnnnnnnnnnnnnnnnnnnnnnnnnnnnnnnnnnnnnnnnnnnnnnnnnnnnnnnnnnnnnnnnnnnnnnnnnnnnnnnnnnnnnnnnnnnnnnnnnnnnnnnnnnnnnnnnnnnnnnnnnnnnnnnnnnnnnnnnnnnnnnnnnnnnnnnnnnnnnnnnnnnnnnnnnnnnnnnnnnnnnnnnnnnnnnnnnnnnnnnnnnnnnnnnnnnnnnnnnnnnnnnnnnnnnnnnnnnnnnnnnnnnnnnnnnnnnnnnnnnnnnnnnnnnnnnnnnnnnnnnnnnnnnnnnnnnnnnnnnnnnnnnnnnnnnnnnnnnnnnnnnnnnnnnnnnnnnnnnnnnnnnnnnnnnnnnnnnnnnnnnnnnnnnnnnnnnnnnnnnnnnnnnnnnnnnnnnnnnnnnnnnnnnnnnnnnnnnnnnnnnnnnnnnnnnnnnnnnnnnnnnnnnnnnnnnnnnnnnnnnnnnnnnnnnnnnnnnnnnnnnnnnnnnnnnnnnnnnnnnnnnnnnnnnnnnnnnnnnnnnnnnnnnnnnnnnnnnnnnnnnnnnnnnnnnnnnnnnnnnnnnnnnnnnnnnnnnnnnnnnnnnnnnnnnnnnnnnnnnnnnnnnnnnnnnnnnnnnnnnnnnnnnnnnnnnnnnnnnnnnnnnnnnnnnnnnnnnnnnnnnnnnnnnnnnnnnnnnnnnnnnnnnnnnnnnnnnnnnnnnnnnnnnnnnnnnnnnnnnnnnnnnnnnnnnnnnnnnnnnnnnnnnnnnnnnnnnnnnnnnnnnnnnnnnnnnnnnnnnnnnnnnnnnnnnnnnnnnnnnnnnnnnnnnnnnnnnnnnnnnnnnnnnnnnnnnnnnnnnnnnnnnnnnnnnnnnnnnnnnnnnnnnnnnnnnnnnnnnnnnnnnnnnnnnnnnnnnnnnnnnnnnnnnnnnnnnnnnnnnnnnnnnnnnnnnnnnnnnnnnnnnnnnnnnnnnnnnnnnnnnnnnnnnnnnnnnnnnnnnnnnnnnnnnnnnnnnnnnnnnnnnnnnnnnnnnnnnnnnnnnnnnnnnnnnnnnnnnnnnnnnnnnnnnnnnnnnnnnnnnnnnnnnnnnnnnnnnnnnnnnnnnnnnnnnnnnnnnnnnnnnnnnnnnnnnnnnnnnnnnnnnnnnnnnnnnnnnnnnnnnnnnnnnnnnnnnnnnnnnnnnnnnnnnnnnnnnnnnnnnnnnnnnnnnnnnnnnnnnnnnnnnnnnnnnnnnnnnnnnnnnnnnnnnnnnnnnnnnnnnnnnnnnnnnnnnnnnnnnnnnnnnnnnnnnnnnnnnnnnnnnnnnnnnnnnnnnnnnnnnnnnnnnnnnnnnnnnnnnnnnnnnnnnnnnnnnnnnnnnnnnnnnnnnnnnnnnnnnnnnnnnnnnnnnnnnnnnnnnnnnnnnnnnnnnnnnnnnnnnnnnnnnnnnnnnnnnnnnnnnnnnnnnnnnnnnnnnnnnnnnnnnnnnnnnnnnnnnnnnnnnnnnnnnnnnnnnnnnnnnnnnnnnnnnnnnnnnnnnnnnnnnnnnnnnnnnnnnnnnnnnnnnnnnnnnnnnnnnnnnnnnnnnnnnnnnnnnnnnnnnnnnnnnnnnnnnnnnnnnnnnnnnnnnnnnnnnnnnnnnnnnnnnnnnnnnnnnnnnnnnnnnnnnnnnnnnnnnnnnnnnnnnnnnnnnnnnnnnnnnnnnnnnnnnnnnnnnnnnnnnnnnnnnnnnnnnnnnnnnnnnnnnnnnnnnnnnnnnnnnnnnnnnnnnnnnnnnnnnnnnnnnnnnnnnnnnnnnnnnnnnnnnnnnnnnnnnnnnnnnnnnnnnnnnnnnnnnnnnnnnnnnnnnnnnnnnnnnnnnnnnnnnnnnnnnnnnnnnnnnnnnnnnnnnnnnnnnnnnnnnnnnnnnnnnnnnnnnnnnnnnnnnnnnnnnnnnnnnnnnnnnnnnnnnnnnnnnnnnnnnnnnnnnnnnnnnnnnnnnnnnnnnnnnnnnnnnnnnnnnnnnnnnnnnnnnnnnnnnnnnnnnnnnnnnnnnnnnnnnnnnnnnnnnnnnnnnnnnnnnnnnnnnnnnnnnnnnnnnnnnnnnnnnnnnnnnnnnnnnnnnnnnnnnnnnnnnnnnnnnnnnnnnnnnnnnnnnnnnnnnnnnnnnnnnnnnnnnnnnnnnnnnnnnnnnnnnnnnnnnnnnnnnnnnnnnnnnnnnnnnnnnnnnnnnnnnnnnnnnnnnnnnnnnnnnnnnnnnnnnnnnnnnnnnnnnnnnnnnnnnnnnnnnnnnnnnnnnnnnnnnnnnnnnnnnnnnnnnnnnnnnnnnnnnnnnnnnnnnnnnnnnnnnnnnnnnnnnnnnnnnnnnnnnnnnnnnnnnnnnnnnnnnnnnnnnnnnnnnnnnnnnnnnnnnnnnnnnnnnnnnnnnnnnnnnnnnnnnnnnnnnnnnnnnnnnnnnnnnnnnnnnnnnnnnnnnnnnnnnnnnnnnnnnnnnnnnnnnnnnnnnnnnnnnnnnnnnnnnnnnnnnnnnnnnnnnnnnnnnnnnnnnnnnnnnnnnnnnnnnnnnnnnnnnnnnnnnnnnnnnnnnnnnnnnnnnnnnnnnnnnnnnnnnnnnnnnnnnnnnnnnnnnnnnnnnnnnnnnnnnnnnnnnnnnnnnnnnnnnnnnnnnnnnnnnnnnnnnnnnnnnnnnnnnnnnnnnnnnnnnnnnnnnnnnnnnnnnnnnnnnnnnnnnnnnnnnnnnnnnnnnnnnnnnnnnnnnnnnnnnnnnnnnnnnnnnnnnnnnnnnnnnnnnnnnnnnnnnnnnnnnnnnnnnnnnnnnnnnnnnnnnnnnnnnnnnnnnnnnnnnnnnnnnnnnnnnnnnnnnnnnnnnnnnnnnnnnnnnnnnnnnnnnnnnnnnnnnnnnnnnnnnnnnnnnnnnnnnnnnnnnnnnnnnnnnnnnnnnnnnnnnnnnnnnnnnnnnnnnnnnnnnnnnnnnnnnnnnnnnnnnnnnnnnnnnnnnnnnnnnnnnnnnnnnnnnnnnnnnnnnnnnnnnnnnnnnnnnnnnnnnnnnnnnnnnnnnnnnnnnnnnnnnnnnnnnnnnnnnnnnnnnnnnnnnnnnnnnnnnnnnnnnnnnnnnnnnnnnnnnnnnnnnnnnnnnnnnnnnnnnnnnnnnnnnnnnnnnnnnnnnnnnnnnnnnnnnnnnnnnnnnnnnnnnnnnnnnnnnnnnnnnnnnnnnnnnnnnnnnnnnnnnnnnnnnnnnnnnnnnnnnnnnnnnnnnnnnnnnnnnnnnnnnnnnnnnnnnnnnnnnnnnnnnnnnnnnnnnnnnnnnnnnnnnnnnnnnnnnnnnnnnnnnnnnnnnnnnnnnnnnnnnnnnnnnnnnnnnnnnnnnnnnnnnnnnnnnnnnnnnnnnnnnnnnnnnnnnnnnnnnnnnnnnnnnnnnnnnnnnnnnnnnnnnnnnnnnnnnnnnnnnnnnnnnnnnnnnnnnnnnnnnnnnnnnnnnnnnnnnnnnnnnnnnnnnnnnnnnnnnnnnnnnnnnnnnnnnnnnnnnnnnnnnnnnnnnnnnnnnnnnnnnnnnnnnnnnnnnnnnnnnnnnnnnnnnnnnnnnnnnnnnnnnnnnnnnnnnnnnnnnnnnnnnnnnnnnnnnnnnnnnnnnnnnnnnnnnnnnnnnnnnnnnnnnnnnnnnnnnnnnnnnnnnnnnnnnnnnnnnnnnnnnnnnnnnnnnnnnnnnnnnnnnnnnnnnnnnnnnnnnnnnnnnnnnnnnnnnnnnnnnnnnnnnnnnnnnnnnnnnnnnnnnnnnnnnnnnnnnnnnnnnnnnnnnnnnnnnnnnnnnnnnnnnnnnnnnnnnnnnnnnnnnnnnnnnnnnnnnnnnnnnnnnnnnnnnnnnnnnnnnnnnnnnnnnnnnnnnnnnnnnnnnnnnnnnnnnnnnnnnnnnnnnnnnnnnnnnnnnnnnnnnnnnnnnnnnnnnnnnnnnnnnnnnnnnnnnnnnnnnnnnnnnnnnnnnnnnnnnnnnnnnnnnnnnnnnnnnnnnnnnnnnnnnnnnnnnnnnnnnnnnnnnnnnnnnnnnnnnnnnnnnnnnnnnnnnnnnnnnnnnnnnnnnnnnnnnnnnnnnnnnnnnnnnnnnnnnnnnnnnnnnnnnnnnnnnnnnnnnnnnnnnnnnnnnnnnnnnnnnnnnnnnnnnnnnnnnnnnnnnnnnnnnnnnnnnnnnnnnnnnnnnnnnnnnnnnnnnnnnnnnnnnnnnnnnnnnnnnnnnnnnnnnnnnnnnnnnnnnnnnnnnnnnnnnnnnnnnnnnnnnnnnnnnnnnnnnnnnnnnnnnnnnnnnnnnnnnnnnnnnnnnnnnnnnnnnnnnnnnnnnnnnnnnnnnnnnnnnnnnnnnnnnnnnnnnnnnnnnnnnnnnnnnnnnnnnnnnnnnnnnnnnnnnnnnnnnnnnnnnnnnnnnnnnnnnnnnnnnnnnnnnnnnnnnnnnnnnnnnnnnnnnnnnnnnnnnnnnnnnnnnnnnnnnnnnnnnnnnnnnnnnnnnnnnnnnnnnnnnnnnnnnnnnnnnnnnnnnnnnnnnnnnnnnnnnnnnnnnnnnnnnnnnnnnnnnnnnnnnnnnnnnnnnnnnnnnnnnnnnnnnnnnnnnnnnnnnnnnnnnnnnnnnnnnnnnnnnnnnnnnnnnnnnnnnnnnnnnnnnnnnnnnnnnnnnnnnnnnnnnnnnnnnnnnnnnnnnnnnnnnnnnnnnnnnnnnnnnnnnnnnnnnnnnnnnnnnnnnnnnnnnnnnnnnnnnnnnnnnnnnnnnnnnnnnnnnnnnnnnnnnnnnnnnnnnnnnnnnnnnnnnnnnnnnnnnnnnnnnnnnnnnnnnnnnnnnnnnnnnnnnnnnnnnnnnnnnnnnnnnnnnnnnnnnnnnnnnnnnnnnnnnnnnnnnnnnnnnnnnnnnnnnnnnnnnnnnnnnnnnnnnnnnnnnnnnnnnnnnnnnnnnnnnnnnnnnnnnnnnnnnnnnnnnnnnnnnnnnnnnnnnnnnnnnnnnnnnnnnnnnnnnnnnnnnnnnnnnnnnnnnnnnnnnnnnnnnnnnnnnnnnnnnnnnnnnnnnnnnnnnnnnnnnnnnnnnnnnnnnnnnnnnnnnnnnnnnnnnnnnnnnnnnnnnnnnnnnnnnnnnnnnnnnnnnnnnnnnnnnnnnnnnnnnnnnnnnnnnnnnnnnnnnnnnnnnnnnnnnnnnnnnnnnnnnnnnnnnnnnnnnnnnnnnnnnnnnnnnnnnnnnnnnnnnnnnnnnnnnnnnnnnnnnnnnnnnnnnnnnnnnnnnnnnnnnnnnnnnnnnnnnnnnnnnnnnnnnnnnnnnnnnnnnnnnnnnnnnnnnnnnnnnnnnnnnnnnnnnnnnnnnnnnnnnnnnnnnnnnnnnnnnnnnnnnnnnnnnnnnnnnnnnnnnnnnnnnnnnnnnnnnnnnnnnnnnnnnnnnnnnnnnnnnnnnnnnnnnnnnnnnnnnnnnnnnnnnnnnnnnnnnnnnnnnnnnnnnnnnnnnnnnnnnnnnnnnnnnnnnnnnnnnnnnnnnnnnnnnnnnnnnnnnnnnnnnnnnnnnnnnnnnnnnnnnnnnnnnnnnnnnnnnnnnnnnnnnnnnnnnnnnnnnnnnnnnnnnnnnnnnnnnnnnnnnnnnnnnnnnnnnnnnnnnnnnnnnnnnnnnnnnnnnnnnnnnnnnnnnnnnnnnnnnnnnnnnnnnnnnnnnnnnnnnnnnnnnnnnnnnnnnnnnnnnnnnnnnnnnnnnnnnnnnnnnnnnnnnnnnnnnnnnnnnnnnnnnnnnnnnnnnnnnnnnnnnnnnnnnnnnnnnnnnnnnnnnnnnnnnnnnnnnnnnnnnnnnnnnnnnnnnnnnnnnnnnnnnnnnnnnnnnnnnnnnnnnnnnnnnnnnnnnnnnnnnnnnnnnnnnnnnnnnnnnnnnnnnnnnnnnnnnnnnnnnnnnnnnnnnnnnnnnnnnnnnnnnnnnnnnnnnnnnnnnnnnnnnnnnnnnnnnnnnnnnnnnnnnnnnnnnnnnnnnnnnnnnnnnnnnnnnnnnnnnnnnnnnnnnnnnnnnnnnnnnnnnnnnnnnnnnnnnnnnnnnnnnnnnnnnnnnnnnnnnnnnnnnnnnnnnnnnnnnnnnnnnnnnnnnnnnnnnnnnnnnnnnnnnnnnnnnnnnnnnnnnnnnnnnnnnnnnnnnnnnnnnnnnnnnnnnnnnnnnnnnnnnnnnnnnnnnnnnnnnnnnnnnnnnnnnnnnnnnnnnnnnnnnnnnnnnnnnnnnnnnnnnnnnnnnnnnnnnnnnnnnnnnnnnnnnnnnnnnnnnnnnnnnnnnnnnnnnnnnnnnnnnnnnnnnnnnnnnnnnnnnnnnnnnnnnnnnnnnnnnnnnnnnnnnnnnnnnnnnnnnnnnnnnnnnnnnnnnnnnnnnnnnnnnnnnnnnnnnnnnnnnnnnnnnnnnnnnnnnnnnnnnnnnnnnnnnnnnnnnnnnnnnnnnnnnnnnnnnnnnnnnnnnnnnnnnnnnnnnnnnnnnnnnnnnnnnnnnnnnnnnnnnnnnnnnnnnnnnnnnnnnnnnnnnnnnnnnnnnnnnnnnnnnnnnnnnnnnnnnnnnnnnnnnnnnnnnnnnnnnnnnnnnnnnnnnnnnnnnnnnnnnnnnnnnnnnnnnnnnnnnnnnnnnnnnnnnnnnnnnnnnnnnnnnnnnnnnnnnnnnnnnnnnnnnnnnnnnnnnnnnnnnnnnnnnnnnnnnnnnnnnnnnnnnnnnnnnnnnnnnnnnnnnnnnnnnnnnnnnnnnnnnnnnnnnnnnnnnnnnnnnnnnnnnnnnnnnnnnnnnnnnnnnnnnnnnnnnnnnnnnnnnnnnnnnnnnnnnnnnnnnnnnnnnnnnnnnnnnnnnnnnnnnnnnnnnnnnnnnnnnnnnnnnnnnnnnnnnnnnnnnnnnnnnnnnnnnnnnnnnnnnnnnnnnnnnnnnnnnnnnnnnnnnnnnnnnnnnnnnnnnnnnnnnnnnnnnnnnnnnnnnnnnnnnnnnnnnnnnnnnnnnnnnnnnnnnnnnnnnnnnnnnnnnnnnnnnnnnnnnnnnnnnnnnnnnnnnnnnnnnnnnnnnnnnnnnnnnnnnnnnnnnnnnnnnnnnnnnnnnnnnnnnnnnnnnnnnnnnnnnnnnnnnnnnnnnnnnnnnnnnnnnnnnnnnnnnnnnnnnnnnnnnnnnnnnnnnnnnnnnnnnnnnnnnnnnnnnnnnnnnnnnnnnnnnnnnnnnnnnnnnnnnnnnnnnnnnnnnnnnnnnnnnnnnnnnnnnnnnnnnnnnnnnnnnnnnnnnnnnnnnnnnnnnnnnnnnnnnnnnnnnnnnnnnnnnnnnnnnnnnnnnnnnnnnnnnnnnnnnnnnnnnnnnnnnnnnnnnnnnnnnnnnnnnnnnnnnnnnnnnnnnnnnnnnnnnnnnnnnnnnnnnnnnnnnnnnnnnnnnnnnnnnnnnnnnnnnnnnnnnnnnnnnnnnnnnnnnnnnnnnnnnnnnnnnnnnnnnnnnnnnnnnnnnnnnnnnnnnnnnnnnnnnnnnnnnnnnnnnnnnnnnnnnnnnnnnnnnnnnnnnnnnnnnnnnnnnnnnnnnnnnnnnnnnnnnnnnnnnnnnnnnnnnnnnnnnnnnnnnnnnnnnnnnnnnnnnnnnnnnnnnnnnnnnnnnnnnnnnnnnnnnnnnnnnnnnnnnnnnnnnnnnnnnnnnnnnnnnnnnnnnnnnnnnnnnnnnnnnnnnnnnnnnnnnnnnnnnnnnnnnnnnnnnnnnnnnnnnnnnnnnnnnnnnnnnnnnnnnnnnnnnnnnnnnnnnnnnnnnnnnnnnnnnnnnnnnnnnnnnnnnnnnnnnnnnnnnnnnnnnnnnnnnnnnnnnnnnnnnnnnnnnnnnnnnnnnnnnnnnnnnnnnnnnnnnnnnnnnnnnnnnnnnnnnnnnnnnnnnnnnnnnnnnnnnnnnnnnnnnnnnnnnnnnnnnnnnnnnnnnnnnnnnnnnnnnnnnnnnnnnnnnnnnnnnnnnnnnnnnnnnnnnnnnnnnnnnnnnnnnnnnnnnnnnnnnnnnnnnnnnnnnnnnnnnnnnnnnnnnnnnnnnnnnnnnnnnnnnnnnnnnnnnnnnnnnnnnnnnnnnnnnnnnnnnnnnnnnnnnnnnnnnnnnnnnnnnnnnnnnnnnnnnnnnnnnnnnnnnnnnnnnnnnnnnnnnnnnnnnnnnnnnnnnnnnnnnnnnnnnnnnnnnnnnnnnnnnnnnnnnnnnnnnnnnnnnnnnnnnnnnnnnnnnnnnnnnnnnnnnnnnnnnnnnnnnnnnnnnnnnnnnnnnnnnnnnnnnnnnnnnnnnnnnnnnnnnnnnnnnnnnnnnnnnnnnnnnnnnnnnnnnnnnnnnnnnnnnnnnnnnnnnnnnnnnnnnnnnnnnnnnnnnnnnnnnnnnnnnnnnnnnnnnnnnnnnnnnnnnnnnnnnnnnnnnnnnnnnnnnnnnnnnnnnnnnnnnnnnnnnnnnnnnnnnnnnnnnnnnnnnnnnnnnnnnnnnnnnnnnnnnnnnnnnnnnnnnnnnnnnnnnnnnnnnnnnnnnnnnnnnnnnnnnnnnnnnnnnnnnnnnnnnnnnnnnnnnnnnnnnnnnnnnnnnnnnnnnnnnnnnnnnnnnnnnnnnnnnnnnnnnnnnnnnnnnnnnnnnnnnnnnnnnnnnnnnnnnnnnnnnnnnnnnnnnnnnnnnnnnnnnnnnnnnnnnnnnnnnnnnnnnnnnnnnnnnnnnnnnnnnnnnnnnnnnnnnnnnnnnnnnnnnnnnnnnnnnnnnnnnnnnnnnnnnnnnnnnnnnnnnnnnnnnnnnnnnnnnnnnnnnnnnnnnnnnnnnnnnnnnnnnnnnnnnnnnnnnnnnnnnnnnnnnnnnnnnnnnnnnnnnnnnnnnnnnnnnnnnnnnnnnnnnnnnnnnnnnnnnnnnnnnnnnnnnnnnnnnnnnnnnnnnnnnnnnnnnnnnnnnnnnnnnnnnnnnnnnnnnnnnnnnnnnnnnnnnnnnnnnnnnnnnnnnnnnnnnnnnnnnnnnnnnnnnnnnnnnnnnnnnnnnnnnnnnnnnnnnnnnnnnnnnnnnnnnnnnnnnnnnnnnnnnnnnnnnnnnnnnnnnnnnnnnnnnnnnnnnnnnnnnnnnnnnnnnnnnnnnnnnnnnnnnnnnnnnnnnnnnnnnnnnnnnnnnnnnnnnnnnnnnnnnnnnnnnnnnnnnnnnnnnnnnnnnnnnnnnnnnnnnnnnnnnnnnnnnnnnnnnnnnnnnnnnnnnnnnnnnnnnnnnnnnnnnnnnnnnnnnnnnnnnnnnnnnnnnnnnnnnnnnnnnnnnnnnnnnnnnnnnnnnnnnnnnnnnnnnnnnnnnnnnnnnnnnnnnnnnnnnnnnnnnnnnnnnnnnnnnnnnnnnnnnnnnnnnnnnnnnnnnnnnnnnnnnnnnnnnnnnnnnnnnnnnnnnnnnnnnnnnnnnnnnnnnnnnnnnnnnnnnnnnnnnnnnnnnnnnnnnnnnnnnnnnnnnnnnnnnnnnnnnnnnnnnnnnnnnnnnnnnnnnnnnnnnnnnnnnnnnnnnnnnnnnnnnnnnnnnnnnnnnnnnnnnnnnnnnnnnnnnnnnnnnnnnnnnnnnnnnnnnnnnnnnnnnnnnnnnnnnnnnnnnnnnnnnnnnnnnnnnnnnnnnnnnnnnnnnnnnnnnnnnnnnnnnnnnnnnnnnnnnnnnnnnnnnnnnnnnnnnnnnnnnnnnnnnnnnnnnnnnnnnnnnnnnnnnnnnnnnnnnnnnnnnnnnnnnnnnnnnnnnnnnnnnnnnnnnnnnnnnnnnnnnnnnnnnnnnnnnnnnnnnnnnnnnnnnnnnnnnnnnnnnnnnnnnnnnnnnnnnnnnnnnnnnnnnnnnnnnnnnnnnnnnnnnnnnnnnnnnnnnnnnnnnnnnnnnnnnnnnnnnnnnnnnnnnnnnnnnnnnnnnnnnnnnnnnnnnnnnnnnnnnnnnnnnnnnnnnnnnnnnnnnnnnnnnnnnnnnnnnnnnnnnnnnnnnnnnnnnnnnnnnnnnnnnnnnnnnnnnnnnnnnnnnnnnnnnnnnnnnnnnnnnnnnnnnnnnnnnnnnnnnnnnnnnnnnnnnnnnnnnnnnnnnnnnnnnnnnnnnnnnnnnnnnnnnnnnnnnnnnnnnnnnnnnnnnnnnnnnnnnnnnnnnnnnnnnnnnnnnnnnnnnnnnnnnnnnnnnnnnnnnnnnnnnnnnnnnnnnnnnnnnnnnnnnnnnnnnnnnnnnnnnnnnnnnnnnnnnnnnnnnnnnnnnnnnnnnnnnnnnnnnnnnnnnnnnnnnnnnnnnnnnnnnnnnnnnnnnnnnnnnnnnnnnnnnnnnnnnnnnnnnnnnnnnnnnnnnnnnnnnnnnnnnnnnnnnnnnnnnnnnnnnnnnnnnnnnnnnnnnnnnnnnnnnnnnnnnnnnnnnnnnnnnnnnnnnnnnnnnnnnnnnnnnnnnnnnnnnnnnnnnnnnnnnnnnnnnnnnnnnnnnnnnnnnnnnnnnnnnnnnnnnnnnnnnnnnnnnnnnnnnnnnnnnnnnnnnnnnnnnnnnnnnnnnnnnnnnnnnnnnnnnnnnnnnnnnnnnnnnnnnnnnnnnnnnnnnnnnnnnnnnnnnnnnnnnnnnnnnnnnnnnnnnnnnnnnnnnnnnnnnnnnnnnnnnnnnnnnnnnnnnnnnnnnnnnnnnnnnnnnnnnnnnnnnnnnnnnnnnnnnnnnnnnnnnnnnnnnnnnnnnnnnnnnnnnnnnnnnnnnnnnnnnnnnnnnnnnnnnnnnnnnnnnnnnnnnnnnnnnnnnnnnnnnnnnnnnnnnnnnnnnnnnnnnnnnnnnnnnnnnnnnnnnnnnnnnnnnnnnnnnnnnnnnnnnnnnnnnnnnnnnnnnnnnnnnnnnnnnnnnnnnnnnnnnnnnnnnnnnnnnnnnnnnnnnnnnnnnnnnnnnnnnnnnnnnnnnnnnnnnnnnnnnnnnnnnnnnnnnnnnnnnnnnnnnnnnnnnnnnnnnnnnnnnnnnnnnnnnnnnnnnnnnnnnnnnnnnnnnnnnnnnnnnnnnnnnnnnnnnnnnnnnnnnnnnnnnnnnnnnnnnnnnnnnnnnnnnnnnnnnnnnnnnnnnnnnnnnnnnnnnnnnnnnnnnnnnnnnnnnnnnnnnnnnnnnnnnnnnnnnnnnnnnnnnnnnnnnnnnnnnnnnnnnnnnnnnnnnnnnnnnnnnnnnnnnnnnnnnnnnnnnnnnnnnnnnnnnnnnnnnnnnnnnnnnnnnnnnnnnnnnnnnnnnnnnnnnnnnnnnnnnnnnnnnnnnnnnnnnnnnnnnnnnnnnnnnnnnnnnnnnnnnnnnnnnnnnnnnnnnnnnnnnnnnnnnnnnnnnnnnnnnnnnnnnnnnnnnnnnnnnnnnnnnnnnnnnnnnnnnnnnnnnnnnnnnnnnnnnnnnnnnnnnnnnnnnnnnnnnnnnnnnnnnnnnnnnnnnnnnnnnnnnnnnnnnnnnnnnnnnnnnnnnnnnnnnnnnnnnnnnnnnnnnnnnnnnnnnnnnnnnnnnnnnnnnnnnnnnnnnnnnnnnnnnnnnnnnnnnnnnnnnnnnnnnnnnnnnnnnnnnnnnnnnnnnnnnnnnnnnnnnnnnnnnnnnnnnnnnnnnnnnnnnnnnnnnnnnnnnnnnnnnnnnnnnnnnnnnnnnnnnnnnnnnnnnnnnnnnnnnnnnnnnnnnnnnnnnnnnnnnnnnnnnnnnnnnnnnnnnnnnnnnnnnnnnnnnnnnnnnnnnnnnnnnnnnnnnnnnnnnnnnnnnnnnnnnnnnnnnnnnnnnnnnnnnnnnnnnnnnnnnnnnnnnnnnnnnnnnnnnnnnnnnnnnnnnnnnnnnnnnnnnnnnnnnnnnnnnnnnnnnnnnnnnnnnnnnnnnnnnnnnnnnnnnnnnnnnnnnnnnnnnnnnnnnnnnnnnnnnnnnnnnnnnnnnnnnnnnnnnnnnnnnnnnnnnnnnnnnnnnnnnnnnnnnnnnnnnnnnnnnnnnnnnnnnnnnnnnnnnnnnnnnnnnnnnnnnnnnnnnnnnnnnnnnnnnnnnnnnnnnnnnnnnnnnnnnnnnnnnnnnnnnnnnnnnnnnnnnnnnnnnnnnnnnnnnnnnnnnnnnnnnnnnnnnnnnnnnnnnnnnnnnnnnnnnnnnnnnnnnnnnnnnnnnnnnnnnnnnnnnnnnnnnnnnnnnnnnnnnnnnnnnnnnnnnnnnnnnnnnnnnnnnnnnnnnnnnnnnnnnnnnnnnnnnnnnnnnnnnnnnnnnnnnnnnnnnnnnnnnnnnnnnnnnnnnnnnnnnnnnnnnnnnnnnnnnnnnnnnnnnnnnnnnnnnnnnnnnnnnnnnnnnnnnnnnnnnnnnnnnnnnnnnnnnnnnnnnnnnnnnnnnnnnnnnnnnnnnnnnnnnnnnnnnnnnnnnnnnnnnnnnnnnnnnnnnnnnnnnnnnnnnnnnnnnnnnnnnnnnnnnnnnnnnnnnnnnnnnnnnnnnnnnnnnnnnnnnnnnnnnnnnnnnnnnnnnnnnnnnnnnnnnnnnnnnnnnnnnnnnnnnnnnnnnnnnnnnnnnnnnnnnnnnnnnnnnnnnnnnnnnnnnnnnnnnnnnnnnnnnnnnnnnnnnnnnnnnnnnnnnnnnnnnnnnnnnnnnnnnnnnnnnnnnnnnnnnnnnnnnnnnnnnnnnnnnnnnnnnnnnnnnnnnnnnnnnnnnnnnnnnnnnnnnnnnnnnnnnnnnnnnnnnnnnnnnnnnnnnnnnnnnnnnnnnnnnnnnnnnnnnnnnnnnnnnnnnnnnnnnnnnnnnnnnnnnnnnnnnnnnnnnnnnnnnnnnnnnnnnnnnnnnnnnnnnnnnnnnnnnnnnnnnnnnnnnnnnnnnnnnnnnnnnnnnnnnnnnnnnnnnnnnnnnnnnnnnnnnnnnnnnnnnnnnnnnnnnnnnnnnnnnnnnnnnnnnnnnnnnnnnnnnnnnnnnnnnnnnnnnnnnnnnnnnnnnnnnnnnnnnnnnnnnnnnnnnnnnnnnnnnnnnnnnnnnnnnnnnnnnnnnnnnnnnnnnnnnnnnnnnnnnnnnnnnnnnnnnnnnnnnnnnnnnnnnnnnnnnnnnnnnnnnnnnnnnnnnnnnnnnnnnnnnnnnnnnnnnnnnnnnnnnnnnnnnnnnnnnnnnnnnnnnnnnnnnnnnnnnnnnnnnnnnnnnnnnnnnnnnnnnnnnnnnnnnnnnnnnnnnnnnnnnnnnnnnnnnnnnnnnnnnnnnnnnnnnnnnnnnnnnnnnnnnnnnnnnnnnnnnnnnnnnnnnnnnnnnnnnnnnnnnnnnnnnnnnnnnnnnnnnnnnnnnnnnnnnnnnnnnnnnnnnnnnnnnnnnnnnnnnnnnnnnnnnnnnnnnnnnnnnnnnnnnnnnnnnnnnnnnnnnnnnnnnnnnnnnnnnnnnnnnnnnnnnnnnnnnnnnnnnnnnnnnnnnnnnnnnnnnnnnnnnnnnnnnnnnnnnnnnnnnnnnnnnnnnnnnnnnnnnnnnnnnnnnnnnnnnnnnnnnnnnnnnnnnnnnnnnnnnnnnnnnnnnnnnnnnnnnnnnnnnnnnnnnnnnnnnnnnnnnnnnnnnnnnnnnnnnnnnnnnnnnnnnnnnnnnnnnnnnnnnnnnnnnnnnnnnnnnnnnnnnnnnnnnnnnnnnnnnnnnnnnnnnnnnnnnnnnnnnnnnnnnnnnnnnnnnnnnnnnnnnnnnnnnnnnnnnnnnnnnnnnnnnnnnnnnnnnnnnnnnnnnnnnnnnnnnnnnnnnnnnnnnnnnnnnnnnnnnnnnnnnnnnnnnnnnnnnnnnnnnnnnnnnnnnnnnnnnnnnnnnnnnnnnnnnnnnnnnnnnnnnnnnnnnnnnnnnnnnnnnnnnnnnnnnnnnnnnnnnnnnnnnnnnnnnnnnnnnnnnnnnnnnnnnnnnnnnnnnnnnnnnnnnnnnnnnnnnnnnnnnnnnnnnnnnnnnnnnnnnnnnnnnnnnnnnnnnnnnnnnnnnnnnnnnnnnnnnnnnnnnnnnnnnnnnnnnnnnnnnnnnnnnnnnnnnnnnnnnnnnnnnnnnnnnnnnnnnnnnnnnnnnnnnnnnnnnnnnnnnnnnnnnnnnnnnnnnnnnnnnnnnnnnnnnnnnnnnnnnnnnnnnnnnnnnnnnnnnnnnnnnnnnnnnnnnnnnnnnnnnnnnnnnnnnnnnnnnnnnnnnnnnnnnnnnnnnnnnnnnnnnnnnnnnnnnnnnnnnnnnnnnnnnnnnnnnnnnnnnnnnnnnnnnnnnnnnnnnnnnnnnnnnnnnnnnnnnnnnnnnnnnnnnnnnnnnnnnnnnnnnnnnnnnnnnnnnnnnnnnnnnnnnnnnnnnnnnnnnnnnnnnnnnnnnnnnnnnnnnnnnnnnnnnnnnnnnnnnnnnnnnnnnnnnnnnnnnnnnnnnnnnnnnnnnnnnnnnnnnnnnnnnnnnnnnnnnnnnnnnnnnnnnnnnnnnnnnnnnnnnnnnnnnnnnnnnnnnnnnnnnnnnnnnnnnnnnnnnnnnnnnnnnnnnnnnnnnnnnnnnnnnnnnnnnnnnnnnnnnnnnnnnnnnnnnnnnnnnnnnnnnnnnnnnnnnnnnnnnnnnnnnnnnnnnnnnnnnnnnnnnnnnnnnnnnnnnnnnnnnnnnnnnnnnnnnnnnnnnnnnnnnnnnnnnnnnnnnnnnnnnnnnnnnnnnnnnnnnnnnnnnnnnnnnnnnnnnnnnnnnnnnnnnnnnnnnnnnnnnnnnnnnnnnnnnnnnnnnnnnnnnnnnnnnnnnnnnnnnnnnnnnnnnnnnnnnnnnnnnnnnnnnnnnnnnnnnnnnnnnnnnnnnnnnnnnnnnnnnnnnnnnnnnnnnnnnnnnnnnnnnnnnnnnnnnnnnnnnnnnnnnnnnnnnnnnnnnnnnnnnnnnnnnnnnnnnnnnnnnnnnnnnnnnnnnnnnnnnnnnnnnnnnnnnnnnnnnnnnnnnnnnnnnnnnnnnnnnnnnnnnnnnnnnnnnnnnnnnnnnnnnnnnnnnnnnnnnnnnnnnnnnnnnnnnnnnnnnnnnnnnnnnnnnnnnnnnnnnnnnnnnnnnnnnnnnnnnnnnnnnnnnnnnnnnnnnnnnnnnnnnnnnnnnnnnnnnnnnnnnnnnnnnnnnnnnnnnnnnnnnnnnnnnnnnnnnnnnnnnnnnnnnnnnnnnnnnnnnnnnnnnnnnnnnnnnnnnnnnnnnnnnnnnnnnnnnnnnnnnnnnnnnnnnnnnnnnnnnnnnnnnnnnnnnnnnnnnnnnnnnnnnnnnnnnnnnnnnnnnnnnnnnnnnnnnnnnnnnnnnnnnnnnnnnnnnnnnnnnnnnnnnnnnnnnnnnnnnnnnnnnnnnnnnnnnnnnnnnnnnnnnnnnnnnnnnnnnnnnnnnnnnnnnnnnnnnnnnnnnnnnnnnnnnnnnnnnnnnnnnnnnnnnnnnnnnnnnnnnnnnnnnnnnnnnnnnnnnnnnnnnnnnnnnnnnnnnnnnnnnnnnnnnnnnnnnnnnnnnnnnnnnnnnnnnnnnnnnnnnnnnnnnnnnnnnnnnnnnnnnnnnnnnnnnnnnnnnnnnnnnnnnnnnnnnnnnnnnnnnnnnnnnnnnnnnnnnnnnnnnnnnnnnnnnnnnnnnnnnnnnnnnnnnnnnnnnnnnnnnnnnnnnnnnnnnnnnnnnnnnnnnnnnnnnnnnnnnnnnnnnnnnnnnnnnnnnnnnnnnnnnnnnnnnnnnnnnnnnnnnnnnnnnnnnnnnnnnnnnnnnnnnnnnnnnnnnnnnnnnnnnnnnnnnnnnnnnnnnnnnnnnnnnnnnnnnnnnnnnnnnnnnnnnnnnnnnnnnnnnnnnnnnnnnnnnnnnnnnnnnnnnnnnnnnnnnnnnnnnnnnnnnnnnnnnnnnnnnnnnnnnnnnnnnnnnnnnnnnnnnnnnnnnnnnnnnnnnnnnnnnnnnnnnnnnnnnnnnnnnnnnnnnnnnnnnnnnnnnnnnnnnnnnnnnnnnnnnnnnnnnnnnnnnnnnnnnnnnnnnnnnnnnnnnnnnnnnnnnnnnnnnnnnnnnnnnnnnnnnnnnnnnnnnnnnnnnnnnnnnnnnnnnnnnnnnnnnnnnnnnnnnnnnnnnnnnnnnnnnnnnnnnnnnnnnnnnnnnnnnnnnnnnnnnnnnnnnnnnnnnnnnnnnnnnnnnnnnnnnnnnnnnnnnnnnnnnnnnnnnnnnnnnnnnnnnnnnnnnnnnnnnnnnnnnnnnnnnnnnnnnnnnnnnnnnnnnnnnnnnnnnnnnnnnnnnnnnnnnnnnnnnnnnnnnnnnnnnnnnnnnnnnnnnnnnnnnnnnnnnnnnnnnnnnnnnnnnnnnnnnnnnnnnnnnnnnnnnnnnnnnnnnnnnnnnnnnnnnnnnnnnnnnnnnnnnnnnnnnnnnnnnnnnnnnnnnnnnnnnnnnnnnnnnnnnnnnnnnnnnnnnnnnnnnnnnnnnnnnnnnnnnnnnnnnnnnnnnnnnnnnnnnnnnnnnnnnnnnnnnnnnnnnnnnnnnnnnnnnnnnnnnnnnnnnnnnnnnnnnnnnnnnnnnnnnnnnnnnnnnnnnnnnnnnnnnnnnnnnnnnnnnnnnnnnnnnnnnnnnnnnnnnnnnnnnnnnnnnnnnnnnnnnnnnnnnnnnnnnnnnnnnnnnnnnnnnnnnnnnnnnnnnnnnnnnnnnnnnnnnnnnnnnnnnnnnnnnnnnnnnnnnnnnnnnnnnnnnnnnnnnnnnnnnnnnnnnnnnnnnnnnnnnnnnnnnnnnnnnnnnnnnnnnnnnnnnnnnnnnnnnnnnnnnnnnnnnnnnnnnnnnnnnnnnnnnnnnnnnnnnnnnnnnnnnnnnnnnnnnnnnnnnnnnnnnnnnnnnnnnnnnnnnnnnnnnnnnnnnnnnnnnnnnnnnnnnnnnnnnnnnnnnnnnnnnnnnnnnnnnnnnnnnnnnnnnnnnnnnnnnnnnnnnnnnnnnnnnnnnnnnnnnnnnnnnnnnnnnnnnnnnnnnnnnnnnnnnnnnnnnnnnnnnnnnnnnnnnnnnnnnnnnnnnnnnnnnnnnnnnnnnnnnnnnnnnnnnnnnnnnnnnnnnnnnnnnnnnnnnnnnnnnnnnnnnnnnnnnnnnnnnnnnnnnnnnnnnnnnnnnnnnnnnnnnnnnnnnnnnnnnnnnnnnnnnnnnnnnnnnnnnnnnnnnnnnnnnnnnnnnnnnnnnnnnnnnnnnnnnnnnnnnnnnnnnnnnnnnnnnnnnnnnnnnnnnnnnnnnnnnnnnnnnnnnnnnnnnnnnnnnnnnnnnnnnnnnnnnnnnnnnnnnnnnnnnnnnnnnnnnnnnnnnnnnnnnnnnnnnnnnnnnnnnnnnnnnnnnnnnnnnnnnnnnnnnnnnnnnnnnnnnnnnnnnnnnnnnnnnnnnnnnnnnnnnnnnnnnnnnnnnnnnnnnnnnnnnnnnnnnnnnnnnnnnnnnnnnnnnnnnnnnnnnnnnnnnnnnnnnnnnnnnnnnnnnnnnnnnnnnnnnnnnnnnnnnnnnnnnnnnnnnnnnnnnnnnnnnnnnnnnnnnnnnnnnnnnnnnnnnnnnnnnnnnnnnnnnnnnnnnnnnnnnnnnnnnnnnnnnnnnnnnnnnnnnnnnnnnnnnnnnnnnnnnnnnnnnnnnnnnnnnnnnnnnnnnnnnnnnnnnnnnnnnnnnnnnnnnnnnnnnnnnnnnnnnnnnnnnnnnnnnnnnnnnnnnnnnnnnnnnnnnnnnnnnnnnnnnnnnnnnnnnnnnnnnnnnnnnnnnnnnnnnnnnnnnnnnnnnnnnnnnnnnnnnnnnnnnnnnnnnnnnnnnnnnnnnnnnnnnnnnnnnnnnnnnnnnnnnnnnnnnnnnnnnnnnnnnnnnnnnnnnnnnnnnnnnnnnnnnnnnnnnnnnnnnnnnnnnnnnnnnnnnnnnnnnnnnnnnnnnnnnnnnnnnnnnnnnnnnnnnnnnnnnnnnnnnnnnnnnnnnnnnnnnnnnnnnnnnnnnnnnnnnnnnnnnnnnnnnnnnnnnnnnnnnnnnnnnnnnnnnnnnnnnnnnnnnnnnnnnnnnnnnnnnnnnnnnnnnnnnnnnnnnnnnnnnnnnnnnnnnnnnnnnnnnnnnnnnnnnnnnnnnnnnnnnnnnnnnnnnnnnnnnnnnnnnnnnnnnnnnnnnnnnnnnnnnnnnnnnnnnnnnnnnnnnnnnnnnnnnnnnnnnnnnnnnnnnnnnnnnnnnnnnnnnnnnnnnnnnnnnnnnnnnnnnnnnnnnnnnnnnnnnnnnnnnnnnnnnnnnnnnnnnnnnnnnnnnnnnnnnnnnnnnnnnnnnnnnnnnnnnnnnnnnnnnnnnnnnnnnnnnnnnnnnnnnnnnnnnnnnnnnnnnnnnnnnnnnnnnnnnnnnnnnnnnnnnnnnnnnnnnnnnnnnnnnnnnnnnnnnnnnnnnnnnnnnnnnnnnnnnnnnnnnnnnnnnnnnnnnnnnnnnnnnnnnnnnnnnnnnnnnnnnnnnnnnnnnnnnnnnnnnnnnnnnnnnnnnnnnnnnnnnnnnnnnnnnnnnnnnnnnnnnnnnnnnnnnnnnnnnnnnnnnnnnnnnnnnnnnnnnnnnnnnnnnnnnnnnnnnnnnnnnnnnnnnnnnnnnnnnnnnnnnnnnnnnnnnnnnnnnnnnnnnnnnnnnnnnnnnnnnnnnnnnnnnnnnnnnnnnnnnnnnnnnnnnnnnnnnnnnnnnnnnnnnnnnnnnnnnnnnnnnnnnnnnnnnnnnnnnnnnnnnnnnnnnnnnnnnnnnnnnnnnnnnnnnnnnnnnnnnnnnnnnnnnnnnnnnnnnnnnnnnnnnnnnnnnnnnnnnnnnnnnnnnnnnnnnnnnnnnnnnnnnnnnnnnnnnnnnnnnnnnnnnnnnnnnnnnnnnnnnnnnnnnnnnnnnnnnnnnnnnnnnnnnnnnnnnnnnnnnnnnnnnnnnnnnnnnnnnnnnnnnnnnnnnnnnnnnnnnnnnnnnnnnnnnnnnnnnnnnnnnnnnnnnnnnnnnnnnnnnnnnnnnnnnnnnnnnnnnnnnnnnnnnnnnnnnnnnnnnnnnnnnnnnnnnnnnnnnnnnnnnnnnnnnnnnnnnnnnnnnnnnnnnnnnnnnnnnnnnnnnnnnnnnnnnnnnnnnnnnnnnnnnnnnnnnnnnnnnnnnnnnnnnnnnnnnnnnnnnnnnnnnnnnnnnnnnnnnnnnnnnnnnnnnnnnnnnnnnnnnnnnnnnnnnnnnnnnnnnnnnnnnnnnnnnnnnnnnnnnnnnnnnnnnnnnnnnnnnnnnnnnnnnnnnnnnnnnnnnnnnnnnnnnnnnnnnnnnnnnnnnnnnnnnnnnnnnnnnnnnnnnnnnnnnnnnnnnnnnnnnnnnnnnnnnnnnnnnnnnnnnnnnnnnnnnnnnnnnnnnnnnnnnnnnnnnnnnnnnnnnnnnnnnnnnnnnnnnnnnnnnnnnnnnnnnnnnnnnnnnnnnnnnnnnnnnnnnnnnnnnnnnnnnnnnnnnnnnnnnnnnnnnnnnnnnnnnnnnnnnnnnnnnnnnnnnnnnnnnnnnnnnnnnnnnnnnnnnnnnnnnnnnnnnnnnnnnnnnnnnnnnnnnnnnnnnnnnnnnnnnnnnnnnnnnnnnnnnnnnnnnnnnnnnnnnnnnnnnnnnnnnnnnnnnnnnnnnnnnnnnnnnnnnnnnnnnnnnnnnnnnnnnnnnnnnnnnnnnnnnnnnnnnnnnnnnnnnnnnnnnnnnnnnnnnnnnnnnnnnnnnnnnnnnnnnnnnnnnnnnnnnnnnnnnnnnnnnnnnnnnnnnnnnnnnnnnnnnnnnnnnnnnnnnnnnnnnnnnnnnnnnnnnnnnnnnnnnnnnnnnnnnnnnnnnnnnnnnnnnnnnnnnnnnnnnnnnnnnnnnnnnnnnnnnnnnnnnnnnnnnnnnnnnnnnnnnnnnnnnnnnnnnnnnnnnnnnnnnnnnnnnnnnnnnnnnnnnnnnnnnnnnnnnnnnnnnnnnnnnnnnnnnnnnnnnnnnnnnnnnnnnnnnnnnnnnnnnnnnnnnnnnnnnnnnnnnnnnnnnnnnnnnnnnnnnnnnnnnnnnnnnnnnnnnnnnnnnnnnnnnnnnnnnnnnnnnnnnnnnnnnnnnnnnnnnnnnnnnnnnnnnnnnnnnnnnnnnnnnnnnnnnnnnnnnnnnnnnnnnnnnnnnnnnnnnnnnnnnnnnnnnnnnnnnnnnnnnnnnnnnnnnnnnnnnnnnnnnnnnnnnnnnnnnnnnnnnnnnnnnnnnnnnnnnnnnnnnnnnnnnnnnnnnnnnnnnnnnnnnnnnnnnnnnnnnnnnnnnnnnnnnnnnnnnnnnnnnnnnnnnnnnnnnnnnnnnnnnnnnnnnnnnnnnnnnnnnnnnnnnnnnnnnnnnnnnnnnnnnnnnnnnnnnnnnnnnnnnnnnnnnnnnnnnnnnnnnnnnnnnnnnnnnnnnnnnnnnnnnnnnnnnnnnnnnnnnnnnnnnnnnnnnnnnnnnnnnnnnnnnnnnnnnnnnnnnnnnnnnnnnnnnnnnnnnnnnnnnnnnnnnnnnnnnnnnnnnnnnnnnnnnnnnnnnnnnnnnnnnnnnnnnnnnnnnnnnnnnnnnnnnnnnnnnnnnnnnnnnnnnnnnnnnnnnnnnnnnnnnnnnnnnnnnnnnnnnnnnnnnnnnnnnnnnnnnnnnnnnnnnnnnnnnnnnnnnnnnnnnnnnnnnnnnnnnnnnnnnnnnnnnnnnnnnnnnnnnnnnnnnnnnnnnnnnnnnnnnnnnnnnnnnnnnnnnnnnnnnnnnnnnnnnnnnnnnnnnnnnnnnnnnnnnnnnnnnnnnnnnnnnnnnnnnnnnnnnnnnnnnnnnnnnnnnnnnnnnnnnnnnnnnnnnnnnnnnnnnnnnnnnnnnnnnnnnnnnnnnnnnnnnnnnnnnnnnnnnnnnnnnnnnnnnnnnnnnnnnnnnnnnnnnnnnnnnnnnnnnnnnnnnnnnnnnnnnnnnnnnnnnnnnnnnnnnnnnnnnnnnnnnnnnnnnnnnnnnnnnnnnnnnnnnnnnnnnnnnnnnnnnnnnnnnnnnnnnnnnnnnnnnnnnnnnnnnnnnnnnnnnnnnnnnnnnnnnnnnnnnnnnnnnnnnnnnnnnnnnnnnnnnnnnnnnnnnnnnnnnnnnnnnnnnnnnnnnnnnnnnnnnnnnnnnnnnnnnnnnnnnnnnnnnnnnnnnnnnnnnnnnnnnnnnnnnnnnnnnnnnnnnnnnnnnnnnnnnnnnnnnnnnnnnnnnnnnnnnnnnnnnnnnnnnnnnnnnnnnnnnnnnnnnnnnnnnnnnnnnnnnnnnnnnnnnnnnnnnnnnnnnnnnnnnnnnnnnnnnnnnnnnnnnnnnnnnnnnnnnnnnnnnnnnnnnnnnnnnnnnnnnnnnnnnnnnnnnnnnnnnnnnnnnnnnnnnnnnnnnnnnnnnnnnnnnnnnnnnnnnnnnnnnnnnnnnnnnnnnnnnnnnnnnnnnnnnnnnnnnnnnnnnnnnnnnnnnnnnnnnnnnnnnnnnnnnnnnnnnnnnnnnnnnnnnnnnnnnnnnnnnnnnnnnnnnnnnnnnnnnnnnnnnnnnnnnnnnnnnnnnnnnnnnnnnnnnnnnnnnnnnnnnnnnnnnnnnnnnnnnnnnnnnnnnnnnnnnnnnnnnnnnnnnnnnnnnnnnnnnnnnnnnnnnnnnnnnnnnnnnnnnnnnnnnnnnnnnnnnnnnnnnnnnnnnnnnnnnnnnnnnnnnnnnnnnnnnnnnnnnnnnnnnnnnnnnnnnnnnnnnnnnnnnnnnnnnnnnnnnnnnnnnnnnnnnnnnnnnnnnnnnnnnnnnnnnnnnnnnnnnnnnnnnnnnnnnnnnnnnnnnnnnnnnnnnnnnnnnnnnnnnnnnnnnnnnnnnnnnnnnnnnnnnnnnnnnnnnnnnnnnnnnnnnnnnnnnnnnnnnnnnnnnnnnnnnnnnnnnnnnnnnnnnnnnnnnnnnnnnnnnnnnnnnnnnnnnnnnnnnnnnnnnnnnnnnnnnnnnnnnnnnnnnnnnnnnnnnnnnnnnnnnnnnnnnnnnnnnnnnnnnnnnnnnnnnnnnnnnnnnnnnnnnnnnnnnnnnnnnnnnnnnnnnnnnnnnnnnnnnnnnnnnnnnnnnnnnnnnnnnnnnnnnnnnnnnnnnnnnnnnnnnnnnnnnnnnnnnnnnnnnnnnnnnnnnnnnnnnnnnnnnnnnnnnnnnnnnnnnnnnnnnnnnnnnnnnnnnnnnnnnnnnnnnnnnnnnnnnnnnnnnnnnnnnnnnnnnnnnnnnnnnnnnnnnnnnnnnnnnnnnnnnnnnnnnnnnnnnnnnnnnnnnnnnnnnnnnnnnnnnnnnnnnnnnnnnnnnnnnnnnnnnnnnnnnnnnnnnnnnnnnnnnnnnnnnnnnnnnnnnnnnnnnnnnnnnnnnnnnnnnnnnnnnnnnnnnnnnnnnnnnnnnnnnnnnnnnnnnnnnnnnnnnnnnnnnnnnnnnnnnnnnnnnnnnnnnnnnnnnnnnnnnnnnnnnnnnnnnnnnnnnnnnnnnnnnnnnnnnnnnnnnnnnnnnnnnnnnnnnnnnnnnnnnnnnnnnnnnnnnnnnnnnnnnnnnnnnnnnnnnnnnnnnnnnnnnnnnnnnnnnnnnnnnnnnnnnnnnnnnnnnnnnnnnnnnnnnnnnnnnnnnnnnnnnnnnnnnnnnnnnnnnnnnnnnnnnnnnnnnnnnnnnnnnnnnnnnnnnnnnnnnnnnnnnnnnnnnnnnnnnnnnnnnnnnnnnnnnnnnnnnnnnnnnnnnnnnnnnnnnnnnnnnnnnnnnnnnnnnnnnnnnnnnnnnnnnnnnnnnnnnnnnnnnnnnnnnnnnnnnnnnnnnnnnnnnnnnnnnnnnnnnnnnnnnnnnnnnnnnnnnnnnnnnnnnnnnnnnnnnnnnnnnnnnnnnnnnnnnnnnnnnnnnnnnnnnnnnnnnnnnnnnnnnnnnnnnnnnnnnnnnnnnnnnnnnnnnnnnnnnnnnnnnnnnnnnnnnnnnnnnnnnnnnnnnnnnnnnnnnnnnnnnnnnnnnnnnnnnnnnnnnnnnnnnnnnnnnnnnnnnnnnnnnnnnnnnnnnnnnnnnnnnnnnnnnnnnnnnnnnnnnnnnnnnnnnnnnnnnnnnnnnnnnnnnnnnnnnnnnnnnnnnnnnnnnnnnnnnnnnnnnnnnnnnnnnnnnnnnnnnnnnnnnnnnnnnnnnnnnnnnnnnnnnnnnnnnnnnnnnnnnnnnnnnnnnnnnnnnnnnnnnnnnnnnnnnnnnnnnnnnnnnnnnnnnnnnnnnnnnnnnnnnnnnnnnnnnnnnnnnnnnnnnnnnnnnnnnnnnnnnnnnnnnnnnnnnnnnnnnnnnnnnnnnnnnnnnnnnnnnnnnnnnnnnnnnnnnnnnnnnnnnnnnnnnnnnnnnnnnnnnnnnnnnnnnnnnnnnnnnnnnnnnnnnnnnnnnnnnnnnnnnnnnnnnnnnnnnnnnnnnnnnnnnnnnnnnnnnnnnnnnnnnnnnnnnnnnnnnnnnnnnnnnnnnnnnnnnnnnnnnnnnnnnnnnnnnnnnnnnnnnnnnnnnnnnnnnnnnnnnnnnnnnnnnnnnnnnnnnnnnnnnnnnnnnnnnnnnnnnnnnnnnnnnnnnnnnnnnnnnnnnnnnnnnnnnnnnnnnnnnnnnnnnnnnnnnnnnnnnnnnnnnnnnnnnnnnnnnnnnnnnnnnnnnnnnnnnnnnnnnnnnnnnnnnnnnnnnnnnnnnnnnnnnnnnnnnnnnnnnnnnnnnnnnnnnnnnnnnnnnnnnnnnnnnnnnnnnnnnnnnnnnnnnnnnnnnnnnnnnnnnnnnnnnnnnnnnnnnnnnnnnnnnnnnnnnnnnnnnnnnnnnnnnnnnnnnnnnnnnnnnnnnnnnnnnnnnnnnnnnnnnnnnnnnnnnnnnnnnnnnnnnnnnnnnnnnnnnnnnnnnnnnnnnnnnnnnnnnnnnnnnnnnnnnnnnnnnnnnnnnnnnnnnnnnnnnnnnnnnnnnnnnnnnnnnnnnnnnnnnnnnnnnnnnnnnnnnnnnnnnnnnnnnnnnnnnnnnnnnnnnnnnnnnnnnnnnnnnnnnnnnnnnnnnnnnnnnnnnnnnnnnnnnnnnnnnnnnnnnnnnnnnnnnnnnnnnnnnnnnnnnnnnnnnnnnnnnnnnnnnnnnnnnnnnnnnnnnnnnnnnnnnnnnnnnnnnnnnnnnnnnnnnnnnnnnnnnnnnnnnnnnnnnnnnnnnnnnnnnnnnnnnnnnnnnnnnnnnnnnnnnnnnnnnnnnnnnnnnnnnnnnnnnnnnnnnnnnnnnnnnnnnnnnnnnnnnnnnnnnnnnnnnnnnnnnnnnnnnnnnnnnnnnnnnnnnnnnnnnnnnnnnnnnnnnnnnnnnnnnnnnnnnnnnnnnnnnnnnnnnnnnnnnnnnnnnnnnnnnnnnnnnnnnnnnnnnnnnnnnnnnnnnnnnnnnnnnnnnnnnnnnnnnnnnnnnnnnnnnnnnnnnnnnnnnnnnnnnnnnnnnnnnnnnnnnnnnnnnnnnnnnnnnnnnnnnnnnnnnnnnnnnnnnnnnnnnnnnnnnnnnnnnnnnnnnnnnnnnnnnnnnnnnnnnnnnnnnnnnnnnnnnnnnnnnnnnnnnnnnnnnnnnnnnnnnnnnnnnnnnnnnnnnnnnnnnnnnnnnnnnnnnnnnnnnnnnnnnnnnnnnnnnnnnnnnnnnnnnnnnnnnnnnnnnnnnnnnnnnnnnnnnnnnnnnnnnnnnnnnnnnnnnnnnnnnnnnnnnnnnnnnnnnnnnnnnnnnnnnnnnnnnnnnnnnnnnnnnnnnnnnnnnnnnnnnnnnnnnnnnnnnnnnnnnnnnnnnnnnnnnnnnnnnnnnnnnnnnnnnnnnnnnnnnnnnnnnnnnnnnnnnnnnnnnnnnnnnnnnnnnnnnnnnnnnnnnnnnnnnnnnnnnnnnnnnnnnnnnnnnnnnnnnnnnnnnnnnnnnnnnnnnnnnnnnnnnnnnnnnnnnnnnnnnnnnnnnnnnnnnnnnnnnnnnnnnnnnnnnnnnnnnnnnnnnnnnnnnnnnnnnnnnnnnnnnnnnnnnnnnnnnnnnnnnnnnnnnnnnnnnnnnnnnnnnnnnnnnnnnnnnnnnnnnnnnnnnnnnnnnnnnnnnnnnnnnnnnnnnnnnnnnnnnnnnnnnnnnnnnnnnnnnnnnnnnnnnnnnnnnnnnnnnnnnnnnnnnnnnnnnnnnnnnnnnnnnnnnnnnnnnnnnnnnnnnnnnnnnnnnnnnnnnnnnnnnnnnnnnnnnnnnnnnnnnnnnnnnnnnnnnnnnnnnnnnnnnnnnnnnnnnnnnnnnnnnnnnnnnnnnnnnnnnnnnnnnnnnnnnnnnnnnnnnnnnnnnnnnnnnnnnnnnnnnnnnnnnnnnnnnnnnnnnnnnnnnnnnnnnnnnnnnnnnnnnnnnnnnnnnnnnnnnnnnnnnnnnnnnnnnnnnnnnnnnnnnnnnnnnnnnnnnnnnnnnnnnnnnnnnnnnnnnnnnnnnnnnnnnnnnnnnnnnnnnnnnnnnnnnnnnnnnnnnnnnnnnnnnnnnnnnnnnnnnnnnnnnnnnnnnnnnnnnnnnnnnnnnnnnnnnnnnnnnnnnnnnnnnnnnnnnnnnnnnnnnnnnnnnnnnnnnnnnnnnnnnnnnnnnnnnnnnnnnnnnnnnnnnnnnnnnnnnnnnnnnnnnnnnnnnnnnnnnnnnnnnnnnnnnnnnnnnnnnnnnnnnnnnnnnnnnnnnnnnnnnnnnnnnnnnnnnnnnnnnnnnnnnnnnnnnnnnnnnnnnnnnnnnnnnnnnnnnnnnnnnnnnnnnnnnnnnnnnnnnnnnnnnnnnnnnnnnnnnnnnnnnnnnnnnnnnnnnnnnnnnnnnnnnnnnnnnnnnnnnnnnnnnnnnnnnnnnnnnnnnnnnnnnnnnnnnnnnnnnnnnnnnnnnnnnnnnnnnnnnnnnnnnnnnnnnnnnnnnnnnnnnnnnnnnnnnnnnnnnnnnnnnnnnnnnnnnnnnnnnnnnnnnnnnnnnnnnnnnnnnnnnnnnnnnnnnnnnnnnnnnnnnnnnnnnnnnnnnnnnnnnnnnnnnnnnnnnnnnnnnnnnnnnnnnnnnnnnnnnnnnnnnnnnnnnnnnnnnnnnnnnnnnnnnnnnnnnnnnnnnnnnnnnnnnnnnnnnnnnnnnnnnnnnnnnnnnnnnnnnnnnnnnnnnnnnnnnnnnnnnnnnnnnnnnnnnnnnnnnnnnnnnnnnnnnnnnnnnnnnnnnnnnnnnnnnnnnnnnnnnnnnnnnnnnnnnnnnnnnnnnnnnnnnnnnnnnnnnnnnnnnnnnnnnnnnnnnnnnnnnnnnnnnnnnnnnnnnnnnnnnnnnnnnnnnnnnnnnnnnnnnnnnnnnnnnnnnnnnnnnnnnnnnnnnnnnnnnnnnnnnnnnnnnnnnnnnnnnnnnnnnnnnnnnnnnnnnnnnnnnnnnnnnnnnnnnnnnnnnnnnnnnnnnnnnnnnnnnnnnnnnnnnnnnnnnnnnnnnnnnnnnnnnnnnnnnnnnnnnnnnnnnnnnnnnnnnnnnnnnnnnnnnnnnnnnnnnnnnnnnnnnnnnnnnnnnnnnnnnnnnnnnnnnnnnnnnnnnnnnnnnnnnnnnnnnnnnnnnnnnnnnnnnnnnnnnnnnnnnnnnnnnnnnnnnnnnnnnnnnnnnnnnnnnnnnnnnnnnnnnnnnnnnnnnnnnnnnnnnnnnnnnnnnnnnnnnnnnnnnnnnnnnnnnnnnnnnnnnnnnnnnnnnnnnnnnnnnnnnnnnnnnnnnnnnnnnnnnnnnnnnnnnnnnnnnnnnnnnnnnnnnnnnnnnnnnnnnnnnnnnnnnnnnnnnnnnnnnnnnnnnnnnnnnnnnnnnnnnnnnnnnnnnnnnnnnnnnnnnnnnnnnnnnnnnnnnnnnnnnnnnnnnnnnnnnnnnnnnnnnnnnnnnnnnnnnnnnnnnnnnnnnnnnnnnnnnnnnnnnnnnnnnnnnnnnnnnnnnnnnnnnnnnnnnnnnnnnnnnnnnnnnnnnnnnnnnnnnnnnnnnnnnnnnnnnnnnnnnnnnnnnnnnnnnnnnnnnnnnnnnnnnnnnnnnnnnnnnnnnnnnnnnnnnnnnnnnnnnnnnnnnnnnnnnnnnnnnnnnnnnnnnnnnnnnnnnnnnnnnnnnnnnnnnnnnnnnnnnnnnnnnnnnnnnnnnnnnnnnnnnnnnnnnnnnnnnnnnnnnnnnnnnnnnnnnnnnnnnnnnnnnnnnnnnnnnnnnnnnnnnnnnnnnnnnnnnnnnnnnnnnnnnnnnnnnnnnnnnnnnnnnnnnnnnnnnnnnnnnnnnnnnnnnnnnnnnnnnnnnnnnnnnnnnnnnnnnnnnnnnnnnnnnnnnnnnnnnnnnnnnnnnnnnnnnnnnnnnnnnnnnnnnnnnnnnnnnnnnnnnnnnnnnnnnnnnnnnnnnnnnnnnnnnnnnnnnnnnnnnnnnnnnnnnnnnnnnnnnnnnnnnnnnnnnnnnnnnnnnnnnnnnnnnnnnnnnnnnnnnnnnnnnnnnnnnnnnnnnnnnnnnnnnnnnnnnnnnnnnnnnnnnnnnnnnnnnnnnnnnnnnnnnnnnnnnnnnnnnnnnnnnnnnnnnnnnnnnnnnnnnnnnnnnnnnnnnnnnnnnnnnnnnnnnnnnnnnnnnnnnnnnnnnnnnnnnnnnnnnnnnnnnnnnnnnnnnnnnnnnnnnnnnnnnnnnnnnnnnnnnnnnnnnnnnnnnnnnnnnnnnnnnnnnnnnnnnnnnnnnnnnnnnnnnnnnnnnnnnnnnnnnnnnnnnnnnnnnnnnnnnnnnnnnnnnnnnnnnnnnnnnnnnnnnnnnnnnnnnnnnnnnnnnnnnnnnnnnnnnnnnnnnnnnnnnnnnnnnnnnnnnnnnnnnnnnnnnnnnnnnnnnnnnnnnnnnnnnnnnnnnnnnnnnnnnnnnnnnnnnnnnnnnnnnnnnnnnnnnnnnnnnnnnnnnnnnnnnnnnnnnnnnnnnnnnnnnnnnnnnnnnnnnnnnnnnnnnnnnnnnnnnnnnnnnnnnnnnnnnnnnnnnnnnnnnnnnnnnnnnnnnnnnnnnnnnnnnnnnnnnnnnnnnnnnnnnnnnnnnnnnnnnnnnnnnnnnnnnnnnnnnnnnnnnnnnnnnnnnnnnnnnnnnnnnnnnnnnnnnnnnnnnnnnnnnnnnnnnnnnnnnnnnnnnnnnnnnnnnnnnnnnnnnnnnnnnnnnnnnnnnnnnnnnnnnnnnnnnnnnnnnnnnnnnnnnnnnnnnnnnnnnnnnnnnnnnnnnnnnnnnnnnnnnnnnnnnnnnnnnnnnnnnnnnnnnnnnnnnnnnnnnnnnnnnnnnnnnnnnnnnnnnnnnnnnnnnnnnnnnnnnnnnnnnnnnnnnnnnnnnnnnnnnnnnnnnnnnnnnnnnnnnnnnnnnnnnnnnnnnnnnnnnnnnnnnnnnnnnnnnnnnnnnnnnnnnnnnnnnnnnnnnnnnnnnnnnnnnnnnnnnnnnnnnnnnnnnnnnnnnnnnnnnnnnnnnnnnnnnnnnnnnnnnnnnnnnnnnnnnnnnnnnnnnnnnnnnnnnnnnnnnnnnnnnnnnnnnnnnnnnnnnnnnnnnnnnnnnnnnnnnnnnnnnnnnnnnnnnnnnnnnnnnnnnnnnnnnnnnnnnnnnnnnnnnnnnnnnnnnnnnnnnnnnnnnnnnnnnnnnnnnnnnnnnnnnnnnnnnnnnnnnnnnnnnnnnnnnnnnnnnnnnnnnnnnnnnnnnnnnnnnnnnnnnnnnnnnnnnnnnnnnnnnnnnnnnnnnnnnnnnnnnnnnnnnnnnnnnnnnnnnnnnnnnnnnnnnnnnnnnnnnnnnnnnnnnnnnnnnnnnnnnnnnnnnnnnnnnnnnnnnnnnnnnnnnnnnnnnnnnnnnnnnnnnnnnnnnnnnnnnnnnnnnnnnnnnnnnnnnnnnnnnnnnnnnnnnnnnnnnnnnnnnnnnnnnnnnnnnnnnnnnnnnnnnnnnnnnnnnnnnnnnnnnnnnnnnnnnnnnnnnnnnnnnnnnnnnnnnnnnnnnnnnnnnnnnnnnnnnnnnnnnnnnnnnnnnnnnnnnnnnnnnnnnnnnnnnnnnnnnnnnnnnnnnnnnnnnnnnnnnnnnnnnnnnnnnnnnnnnnnnnnnnnnnnnnnnnnnnnnnnnnnnnnnnnnnnnnnnnnnnnnnnnnnnnnnnnnnnnnnnnnnnnnnnnnnnnnnnnnnnnnnnnnnnnnnnnnnnnnnnnnnnnnnnnnnnnnnnnnnnnnnnnnnnnnnnnnnnnnnnnnnnnnnnnnnnnnnnnnnnnnnnnnnnnnnnnnnnnnnnnnnnnnnnnnnnnnnnnnnnnnnnnnnnnnnnnnnnnnnnnnnnnnnnnnnnnnnnnnnnnnnnnnnnnnnnnnnnnnnnnnnnnnnnnnnnnnnnnnnnnnnnnnnnnnnnnnnnnnnnnnnnnnnnnnnnnnnnnnnnnnnnnnnnnnnnnnnnnnnnnnnnnnnnnnnnnnnnnnnnnnnnnnnnnnnnnnnnnnnnnnnnnnnnnnnnnnnnnnnnnnnnnnnnnnnnnnnnnnnnnnnnnnnnnnnnnnnnnnnnnnnnnnnnnnnnnnnnnnnnnnnnnnnnnnnnnnnnnnnnnnnnnnnnnnnnnnnnnnnnnnnnnnnnnnnnnnnnnnnnnnnnnnnnnnnnnnnnnnnnnnnnnnnnnnnnnnnnnnnnnnnnnnnnnnnnnnnnnnnnnnnnnnnnnnnnnnnnnnnnnnnnnnnnnnnnnnnnnnnnnnnnnnnnnnnnnnnnnnnnnnnnnnnnnnnnnnnnnnnnnnnnnnnnnnnnnnnnnnnnnnnnnnnnnnnnnnnnnnnnnnnnnnnnnnnnnnnnnnnnnnnnnnnnnnnnnnnnnnnnnnnnnnnnnnnnnnnnnnnnnnnnnnnnnnnnnnnnnnnnnnnnnnnnnnnnnnnnnnnnnnnnnnnnnnnnnnnnnnnnnnnnnnnnnnnnnnnnnnnnnnnnnnnnnnnnnnnnnnnnnnnnnnnnnnnnnnnnnnnnnnnnnnnnnnnnnnnnnnnnnnnnnnnnnnnnnnnnnnnnnnnnnnnnnnnnnnnnnnnnnnnnnnnnnnnnnnnnnnnnnnnnnnnnnnnnnnnnnnnnnnnnnnnnnnnnnnnnnnnnnnnnnnnnnnnnnnnnnnnnnnnnnnnnnnnnnnnnnnnnnnnnnnnnnnnnnnnnnnnnnnnnnnnnnnnnnnnnnnnnnnnnnnnnnnnnnnnnnnnnnnnnnnnnnnnnnnnnnnnnnnnnnnnnnnnnnnnnnnnnnnnnnnnnnnnnnnnnnnnnnnnnnnnnnnnnnnnnnnnnnnnnnnnnnnnnnnnnnnnnnnnnnnnnnnnnnnnnnnnnnnnnnnnnnnnnnnnnnnnnnnnnnnnnnnnnnnnnnnnnnnnnnnnnnnnnnnnnnnnnnnnnnnnnnnnnnnnnnnnnnnnnnnnnnnnnnnnnnnnnnnnnnnnnnnnnnnnnnnnnnnnnnnnnnnnnnnnnnnnnnnnnnnnnnnnnnnnnnnnnnnnnnnnnnnnnnnnnnnnnnnnnnnnnnnnnnnnnnnnnnnnnnnnnnnnnnnnnnnnnnnnnnnnnnnnnnnnnnnnnnnnnnnnnnnnnnnnnnnnnnnnnnnnnnnnnnnnnnnnnnnnnnnnnnnnnnnnnnnnnnnnnnnnnnnnnnnnnnnnnnnnnnnnnnnnnnnnnnnnnnnnnnnnnnnnnnnnnnnnnnnnnnnnnnnnnnnnnnnnnnnnnnnnnnnnnnnnnnnnnnnnnnnnnnnnnnnnnnnnnnnnnnnnnnnnnnnnnnnnnnnnnnnnnnnnnnnnnnnnnnnnnnnnnnnnnnnnnnnnnnnnnnnnnnnnnnnnnnnnnnnnnnnnnnnnnnnnnnnnnnnnnnnnnnnnnnnnnnnnnnnnnnnnnnnnnnnnnnnnnnnnnnnnnnnnnnnnnnnnnnnnnnnnnnnnnnnnnnnnnnnnnnnnnnnnnnnnnnnnnnnnnnnnnnnnnnnnnnnnnnnnnnnnnnnnnnnnnnnnnnnnnnnnnnnnnnnnnnnnnnnnnnnnnnnnnnnnnnnnnnnnnnnnnnnnnnnnnnnnnnnnnnnnnnnnnnnnnnnnnnnnnnnnnnnnnnnnnnnnnnnnnnnnnnnnnnnnnnnnnnnnnnnnnnnnnnnnnnnnnnnnnnnnnnnnnnnnnnnnnnnnnnnnnnnnnnnnnnnnnnnnnnnnnnnnnnnnnnnnnnnnnnnnnnnnnnnnnnnnnnnnnnnnnnnnnnnnnnnnnnnnnnnnnnnnnnnnnnnnnnnnnnnnnnnnnnnnnnnnnnnnnnnnnnnnnnnnnnnnnnnnnnnnnnnnnnnnnnnnnnnnnnnnnnnnnnnnnnnnnnnnnnnnnnnnnnnnnnnnnnnnnnnnnnnnnnnnnnnnnnnnnnnnnnnnnnnnnnnnnnnnnnnnnnnnnnnnnnnnnnnnnnnnnnnnnnnnnnnnnnnnnnnnnnnnnnnnnnnnnnnnnnnnnnnnnnnnnnnnnnnnnnnnnnnnnnnnnnnnnnnnnnnnnnnnnnnnnnnnnnnnnnnnnnnnnnnnnnnnnnnnnnnnnnnnnnnnnnnnnnnnnnnnnnnnnnnnnnnnnnnnnnnnnnnnnnnnnnnnnnnnnnnnnnnnnnnnnnnnnnnnnnnnnnnnnnnnnnnnnnnnnnnnnnnnnnnnnnnnnnnnnnnnnnnnnnnnnnnnnnnnnnnnnnnnnnnnnnnnnnnnnnnnnnnnnnnnnnnnnnnnnnnnnnnnnnnnnnnnnnnnnnnnnnnnnnnnnnnnnnnnnnnnnnnnnnnnnnnnnnnnnnnnnnnnnnnnnnnnnnnnnnnnnnnnnnnnnnnnnnnnnnnnnnnnnnnnnnnnnnnnnnnnnnnnnnnnnnnnnnnnnnnnnnnnnnnnnnnnnnnnnnnnnnnnnnnnnnnnnnnnnnnnnnnnnnnnnnnnnnnnnnnnnnnnnnnnnnnnnnnnnnnnnnnnnnnnnnnnnnnnnnnnnnnnnnnnnnnnnnnnnnnnnnnnnnnnnnnnnnnnnnnnnnnnnnnnnnnnnnnnnnnnnnnnnnnnnnnnnnnnnnnnnnnnnnnnnnnnnnnnnnnnnnnnnnnnnnnnnnnnnnnnnnnnnnnnnnnnnnnnnnnnnnnnnnnnnnnnnnnnnnnnnnnnnnnnnnnnnnnnnnnnnnnnnnnnnnnnnnnnnnnnnnnnnnnnnnnnnnnnnnnnnnnnnnnnnnnnnnnnnnnnnnnnnnnnnnnnnnnnnnnnnnnnnnnnnnnnnnnnnnnnnnnnnnnnnnnnnnnnnnnnnnnnnnnnnnnnnnnnnnnnnnnnnnnnnnnnnnnnnnnnnnnnnnnnnnnnnnnnnnnnnnnnnnnnnnnnnnnnnnnnnnnnnnnnnnnnnnnnnnnnnnnnnnnnnnnnnnnnnnnnnnnnnnnnnnnnnnnnnnnnnnnnnnnnnnnnnnnnnnnnnnnnnnnnnnnnnnnnnnnnnnnnnnnnnnnnnnnnnnnnnnnnnnnnnnnnnnnnnnnnnnnnnnnnnnnnnnnnnnnnnnnnnnnnnnnnnnnnnnnnnnnnnnnnnnnnnnnnnnnnnnnnnnnnnnnnnnnnnnnnnnnnnnnnnnnnnnnnnnnnnnnnnnnnnnnnnnnnnnnnnnnnnnnnnnnnnnnnnnnnnnnnnnnnnnnnnnnnnnnnnnnnnnnnnnnnnnnnnnnnnnnnnnnnnnnnnnnnnnnnnnnnnnnnnnnnnnnnnnnnnnnnnnnnnnnnnnnnnnnnnnnnnnnnnnnnnnnnnnnnnnnnnnnnnnnnnnnnnnnnnnnnnnnnnnnnnnnnnnnnnnnnnnnnnnnnnnnnnnnnnnnnnnnnnnnnnnnnnnnnnnnnnnnnnnnnnnnnnnnnnnnnnnnnnnnnnnnnnnnnnnnnnnnnnnnnnnnnnnnnnnnnnnnnnnnnnnnnnnnnnnnnnnnnnnnnnnnnnnnnnnnnnnnnnnnnnnnnnnnnnnnnnnnnnnnnnnnnnnnnnnnnnnnnnnnnnnnnnnnnnnnnnnnnnnnnnnnnnnnnnnnnnnnnnnnnnnnnnnnnnnnnnnnnnnnnnnnnnnnnnnnnnnnnnnnnnnnnnnnnnnnnnnnnnnnnnnnnnnnnnnnnnnnnnnnnnnnnnnnnnnnnnnnnnnnnnnnnnnnnnnnnnnnnnnnnnnnnnnnnnnnnnnnnnnnnnnnnnnnnnnnnnnnnnnnnnnnnnnnnnnnnnnnnnnnnnnnnnnnnnnnnnnnnnnnnnnnnnnnnnnnnnnnnnnnnnnnnnnnnnnnnnnnnnnnnnnnnnnnnnnnnnnnnnnnnnnnnnnnnnnnnnnnnnnnnnnnnnnnnnnnnnnnnnnnnnnnnnnnnnnnnnnnnnnnnnnnnnnnnnnnnnnnnnnnnnnnnnnnnnnnnnnnnnnnnnnnnnnnnnnnnnnnnnnnnnnnnnnnnnnnnnnnnnnnnnnnnnnnnnnnnnnnnnnnnnnnnnnnnnnnnnnnnnnnnnnnnnnnnnnnnnnnnnnnnnnnnnnnnnnnnnnnnnnnnnnnnnnnnnnnnnnnnnnnnnnnnnnnnnnnnnnnnnnnnnnnnnnnnnnnnnnnnnnnnnnnnnnnnnnnnnnnnnnnnnnnnnnnnnnnnnnnnnnnnnnnnnnnnnnnnnnnnnnnnnnnnnnnnnnnnnnnnnnnnnnnnnnnnnnnnnnnnnnnnnnnnnnnnnnnnnnnnnnnnnnnnnnnnnnnnnnnnnnnnnnnnnnnnnnnnnnnnnnnnnnnnnnnnnnnnnnnnnnnnnnnnnnnnnnnnnnnnnnnnnnnnnnnnnnnnnnnnnnnnnnnnnnnnnnnnnnnnnnnnnnnnnnnnnnnnnnnnnnnnnnnnnnnnnnnnnnnnnnnnnnnnnnnnnnnnnnnnnnnnnnnnnnnnnnnnnnnnnnnnnnnnnnnnnnnnnnnnnnnnnnnnnnnnnnnnnnnnnnnnnnnnnnnnnnnnnnnnnnnnnnnnnnnnnnnnnnnnnnnnnnnnnnnnnnnnnnnnnnnnnnnnnnnnnnnnnnnnnnnnnnnnnnnnnnnnnnnnnnnnnnnnnnnnnnnnnnnnnnnnnnnnnnnnnnnnnnnnnnnnnnnnnnnnnnnnnnnnnnnnnnnnnnnnnnnnnnnnnnnnnnnnnnnnnnnnnnnnnnnnnnnnnnnnnnnnnnnnnnnnnnnnnnnnnnnnnnnnnnnnnnnnnnnnnnnnnnnnnnnnnnnnnnnnnnnnnnnnnnnnnnnnnnnnnnnnnnnnnnnnnnnnnnnnnnnnnnnnnnnnnnnnnnnnnnnnnnnnnnnnnnnnnnnnnnnnnnnnnnnnnnnnnnnnnnnnnnnnnnnnnnnnnnnnnnnnnnnnnnnnnnnnnnnnnnnnnnnnnnnnnnnnnnnnnnnnnnnnnnnnnnnnnnnnnnnnnnnnnnnnnnnnnnnnnnnnnnnnnnnnnnnnnnnnnnnnnnnnnnnnnnnnnnnnnnnnnnnnnnnnnnnnnnnnnnnnnnnnnnnnnnnnnnnnnnnnnnnnnnnnnnnnnnnnnnnnnnnnnnnnnnnnnnnnnnnnnnnnnnnnnnnnnnnnnnnnnnnnnnnnnnnnnnnnnnnnnnnnnnnnnnnnnnnnnnnnnnnnnnnnnnnnnnnnnnnnnnnnnnnnnnnnnnnnnnnnnnnnnnnnnnnnnnnnnnnnnnnnnnnnnnnnnnnnnnnnnnnnnnnnnnnnnnnnnnnnnnnnnnnnnnnnnnnnnnnnnnnnnnnnnnnnnnnnnnnnnnnnnnnnnnnnnnnnnnnnnnnnnnnnnnnnnnnnnnnnnnnnnnnnnnnnnnnnnnnnnnnnnnnnnnnnnnnnnnnnnnnnnnnnnnnnnnnnnnnnnnnnnnnnnnnnnnnnnnnnnnnnnnnnnnnnnnnnnnnnnnnnnnnnnnnnnnnnnnnnnnnnnnnnnnnnnnnnnnnnnnnnnnnnnnnnnnnnnnnnnnnnnnnnnnnnnnnnnnnnnnnnnnnnnnnnnnnnnnnnnnnnnnnnnnnnnnnnnnnnnnnnnnnnnnnnnnnnnnnnnnnnnnnnnnnnnnnnnnnnnnnnnnnnnnnnnnnnnnnnnnnnnnnnnnnnnnnnnnnnnnnnnnnnnnnnnnnnnnnnnnnnnnnnnnnnnnnnnnnnnnnnnnnnnnnnnnnnnnnnnnnnnnnnnnnnnnnnnnnnnnnnnnnnnnnnnnnnnnnnnnnnnnnnnnnnnnnnnnnnnnnnnnnnnnnnnnnnnnnnnnnnnnnnnnnnnnnnnnnnnnnnnnnnnnnnnnnnnnnnnnnnnnnnnnnnnnnnnnnnnnnnnnnnnnnnnnnnnnnnnnnnnnnnnnnnnnnnnnnnnnnnnnnnnnnnnnnnnnnnnnnnnnnnnnnnnnnnnnnnnnnnnnnnnnnnnnnnnnnnnnnnnnnnnnnnnnnnnnnnnnnnnnnnnnnnnnnnnnnnnnnnnnnnnnnnnnnnnnnnnnnnnnnnnnnnnnnnnnnnnnnnnnnnnnnnnnnnnnnnnnnnnnnnnnnnnnnnnnnnnnnnnnnnnnnnnnnnnnnnnnnnnnnnnnnnnnnnnnnnnnnnnnnnnnnnnnnnnnnnnnnnnnnnnnnnnnnnnnnnnnnnnnnnnnnnnnnnnnnnnnnnnnnnnnnnnnnnnnnnnnnnnnnnnnnnnnnnnnnnnnnnnnnnnnnnnnnnnnnnnnnnnnnnnnnnnnnnnnnnnnnnnnnnnnnnnnnnnnnnnnnnnnnnnnnnnnnnnnnnnnnnnnnnnnnnnnnnnnnnnnnnnnnnnnnnnnnnnnnnnnnnnnnnnnnnnnnnnnnnnnnnnnnnnnnnnnnnnnnnnnnnnnnnnnnnnnnnnnnnnnnnnnnnnnnnnnnnnnnnnnnnnnnnnnnnnnnnnnnnnnnnnnnnnnnnnnnnnnnnnnnnnnnnnnnnnnnnnnnnnnnnnnnnnnnnnnnnnnnnnnnnnnnnnnnnnnnnnnnnnnnnnnnnnnnnnnnnnnnnnnnnnnnnnnnnnnnnnnnnnnnnnnnnnnnnnnnnnnnnnnnnnnnnnnnnnnnnnnnnnnnnnnnnnnnnnnnnnnnnnnnnnnnnnnnnnnnnnnnnnnnnnnnnnnnnnnnnnnnnnnnnnnnnnnnnnnnnnnnnnnnnnnnnnnnnnnnnnnnnnnnnnnnnnnnnnnnnnnnnnnnnnnnnnnnnnnnnnnnnnnnnnnnnnnnnnnnnnnnnnnnnnnnnnnnnnnnnnnnnnnnnnnnnnnnnnnnnnnnnnnnnnnnnnnnnnnnnnnnnnnnnnnnnnnnnnnnnnnnnnnnnnnnnnnnnnnnnnnnnnnnnnnnnnnnnnnnnnnnnnnnnnnnnnnnnnnnnnnnnnnnnnnnnnnnnnnnnnnnnnnnnnnnnnnnnnnnnnnnnnnnnnnnnnnnnnnnnnnnnnnnnnnnnnnnnnnnnnnnnnnnnnnnnnnnnnnnnnnnnnnnnnnnnnnnnnnnnnnnnnnnnnnnnnnnnnnnnnnnnnnnnnnnnnnnnnnnnnnnnnnnnnnnnnnnnnnnnnnnnnnnnnnnnnnnnnnnnnnnnnnnnnnnnnnnnnnnnnnnnnnnnnnnnnnnnnnnnnnnnnnnnnnnnnnnnnnnnnnnnnnnnnnnnnnnnnnnnnnnnnnnnnnnnnnnnnnnnnnnnnnnnnnnnnnnnnnnnnnnnnnnnnnnnnnnnnnnnnnnnnnnnnnnnnnnnnnnnnnnnnnnnnnnnnnnnnnnnnnnnnnnnnnnnnnnnnnnnnnnnnnnnnnnnnnnnnnnnnnnnnnnnnnnnnnnnnnnnnnnnnnnnnnnnnnnnnnnnnnnnnnnnnnnnnnnnnnnnnnnnnnnnnnnnnnnnnnnnnnnnnnnnnnnnnnnnnnnnnnnnnnnnnnnnnnnnnnnnnnnnnnnnnnnnnnnnnnnnnnnnnnnnnnnnnnnnnnnnnnnnnnnnnnnnnnnnnnnnnnnnnnnnnnnnnnnnnnnnnnnnnnnnnnnnnnnnnnnnnnnnnnnnnnnnnnnnnnnnnnnnnnnnnnnnnnnnnnnnnnnnnnnnnnnnnnnnnnnnnnnnnnnnnnnnnnnnnnnnnnnnnnnnnnnnnnnnnnnnnnnnnnnnnnnnnnnnnnnnnnnnnnnnnnnnnnnnnnnnnnnnnnnnnnnnnnnnnnnnnnnnnnnnnnnnnnnnnnnnnnnnnnnnnnnnnnnnnnnnnnnnnnnnnnnnnnnnnnnnnnnnnnnnnnnnnnnnnnnnnnnnnnnnnnnnnnnnnnnnnnnnnnnnnnnnnnnnnnnnnnnnnnnnnnnnnnnnnnnnnnnnnnnnnnnnnnnnnnnnnnnnnnnnnnnnnnnnnnnnnnnnnnnnnnnnnnnnnnnnnnnnnnnnnnnnnnnnnnnnnnnnnnnnnnnnnnnnnnnnnnnnnnnnnnnnnnnnnnnnnnnnnnnnnnnnnnnnnnnnnnnnnnnnnnnnnnnnnnnnnnnnnnnnnnnnnnnnnnnnnnnnnnnnnnnnnnnnnnnnnnnnnnnnnnnnnnnnnnnnnnnnnnnnnnnnnnnnnnnnnnnnnnnnnnnnnnnnnnnnnnnnnnnnnnnnnnnnnnnnnnnnnnnnnnnnnnnnnnnnnnnnnnnnnnnnnnnnnnnnnnnnnnnnnnnnnnnnnnnnnnnnnnnnnnnnnnnnnnnnnnnnnnnnnnnnnnnnnnnnnnnnnnnnnnnnnnnnnnnnnnnnnnnnnnnnnnnnnnnnnnnnnnnnnnnnnnnnnnnnnnnnnnnnnnnnnnnnnnnnnnnnnnnnnnnnnnnnnnnnnnnnnnnnnnnnnnnnnnnnnnnnnnnnnnnnnnnnnnnnnnnnnnnnnnnnnnnnnnnnnnnnnnnnnnnnnnnnnnnnnnnnnnnnnnnnnnnnnnnnnnnnnnnnnnnnnnnnnnnnnnnnnnnnnnnnnnnnnnnnnnnnnnnnnnnnnnnnnnnnnnnnnnnnnnnnnnnnnnnnnnnnnnnnnnnnnnnnnnnnnnnnnnnnnnnnnnnnnnnnnnnnnnnnnnnnnnnnnnnnnnnnnnnnnnnnnnnnnnnnnnnnnnnnnnnnnnnnnnnnnnnnnnnnnnnnnnnnnnnnnnnnnnnnnnnnnnnnnnnnnnnnnnnnnnnnnnnnnnnnnnnnnnnnnnnnnnnnnnnnnnnnnnnnnnnnnnnnnnnnnnnnnnnnnnnnnnnnnnnnnnnnnnnnnnnnnnnnnnnnnnnnnnnnnnnnnnnnnnnnnnnnnnnnnnnnnnnnnnnnnnnnnnnnnnnnnnnnnnnnnnnnnnnnnnnnnnnnnnnnnnnnnnnnnnnnnnnnnnnnnnnnnnnnnnnnnnnnnnnnnnnnnnnnnnnnnnnnnnnnnnnnnnnnnnnnnnnnnnnnnnnnnnnnnnnnnnnnnnnnnnnnnnnnnnnnnnnnnnnnnnnnnnnnnnnnnnnnnnnnnnnnnnnnnnnnnnnnnnnnnnnnnnnnnnnnnnnnnnnnnnnnnnnnnnnnnnnnnnnnnnnnnnnnnnnnnnnnnnnnnnnnnnnnnnnnnnnnnnnnnnnnnnnnnnnnnnnnnnnnnnnnnnnnnnnnnnnnnnnnnnnnnnnnnnnnnnnnnnnnnnnnnnnnnnnnnnnnnnnnnnnnnnnnnnnnnnnnnnnnnnnnnnnnnnnnnnnnnnnnnnnnnnnnnnnnnnnnnnnnnnnnnnnnnnnnnnnnnnnnnnnnnnnnnnnnnnnnnnnnnnnnnnnnnnnnnnnnnnnnnnnnnnnnnnnnnnnnnnnnnnnnnnnnnnnnnnnnnnnnnnnnnnnnnnnnnnnnnnnnnnnnnnnnnnnnnnnnnnnnnnnnnnnnnnnnnnnnnnnnnnnnnnnnnnnnnnnnnnnnnnnnnnnnnnnnnnnnnnnnnnnnnnnnnnnnnnnnnnnnnnnnnnnnnnnnnnnnnnnnnnnnnnnnnnnnnnnnnnnnnnnnnnnnnnnnnnnnnnnnnnnnnnnnnnnnnnnnnnnnnnnnnnnnnnnnnnnnnnnnnnnnnnnnnnnnnnnnnnnnnnnnnnnnnnnnnnnnnnnnnnnnnnnnnnnnnnnnnnnnnnnnnnnnnnnnnnnnnnnnnnnnnnnnnnnnnnnnnnnnnnnnnnnnnnnnnnnnnnnnnnnnnnnnnnnnnnnnnnnnnnnnnnnnnnnnnnnnnnnnnnnnnnnnnnnnnnnnnnnnnnnnnnnnnnnnnnnnnnnnnnnnnnnnnnnnnnnnnnnnnnnnnnnnnnnnnnnnnnnnnnnnnnnnnnnnnnnnnnnnnnnnnnnnnnnnnnnnnnnnnnnnnnnnnnnnnnnnnnnnnnnnnnnnnnnnnnnnnnnnnnnnnnnnnnnnnnnnnnnnnnnnnnnnnnnnnnnnnnnnnnnnnnnnnnnnnnnnnnnnnnnnnnnnnnnnnnnnnnnnnnnnnnnnnnnnnnnnnnnnnnnnnnnnnnnnnnnnnnnnnnnnnnnnnnnnnnnnnnnnnnnnnnnnnnnnnnnnnnnnnnnnnnnnnnnnnnnnnnnnnnnnnnnnnnnnnnnnnnnnnnnnnnnnnnnnnnnnnnnnnnnnnnnnnnnnnnnnnnnnnnnnnnnnnnnnnnnnnnnnnnnnnnnnnnnnnnnnnnnnnnnnnnnnnnnnnnnnnnnnnnnnnnnnnnnnnnnnnnnnnnnnnnnnnnnnnnnnnnnnnnnnnnnnnnnnnnnnnnnnnnnnnnnnnnnnnnnnnnnnnnnnnnnnnnnnnnnnnnnnnnnnnnnnnnnnnnnnnnnnnnnnnnnnnnnnnnnnnnnnnnnnnnnnnnnnnnnnnnnnnnnnnnnnnnnnnnnnnnnnnnnnnnnnnnnnnnnnnnnnnnnnnnnnnnnnnnnnnnnnnnnnnnnnnnnnnnnnnnnnnnnnnnnnnnnnnnnnnnnnnnnnnnnnnnnnnnnnnnnnnnnnnnnnnnnnnnnnnnnnnnnnnnnnnnnnnnnnnnnnnnnnnnnnnnnnnnnnnnnnnnnnnnnnnnnnnnnnnnnnnnnnnnnnnnnnnnnnnnnnnnnnnnnnnnnnnnnnnnnnnnnnnnnnnnnnnnnnnnnnnnnnnnnnnnnnnnnnnnnnnnnnnnnnnnnnnnnnnnnnnnnnnnnnnnnnnnnnnnnnnnnnnnnnnnnnnnnnnnnnnnnnnnnnnnnnnnnnnnnnnnnnnnnnnnnnnnnnnnnnnnnnnnnnnnnnnnnnnnnnnnnnnnnnnnnnnnnnnnnnnnnnnnnnnnnnnnnnnnnnnnnnnnnnnnnnnnnnnnnnnnnnnnnnnnnnnnnnnnnnnnnnnnnnnnnnnnnnnnnnnnnnnnnnnnnnnnnnnnnnnnnnnnnnnnnnnnnnnnnnnnnnnnnnnnnnnnnnnnnnnnnnnnnnnnnnnnnnnnnnnnnnnnnnnnnnnnnnnnnnnnnnnnnnnnnnnnnnnnnnnnnnnnnnnnnnnnnnnnnnnnnnnnnnnnnnnnnnnnnnnnnnnnnnnnnnnnnnnnnnnnnnnnnnnnnnnnnnnnnnnnnnnnnnnnnnnnnnnnnnnnnnnnnnnnnnnnnnnnnnnnnnnnnnnnnnnnnnnnnnnnnnnnnnnnnnnnnnnnnnnnnnnnnnnnnnnnnnnnnnnnnnnnnnnnnnnnnnnnnnnnnnnnnnnnnnnnnnnnnnnnnnnnnnnnnnnnnnnnnnnnnnnnnnnnnnnnnnnnnnnnnnnnnnnnnnnnnnnnnnnnnnnnnnnnnnnnnnnnnnnnnnnnnnnnnnnnnnnnnnnnnnnnnnnnnnnnnnnnnnnnnnnnnnnnnnnnnnnnnnnnnnnnnnnnnnnnnnnnnnnnnnnnnnnnnnnnnnnnnnnnnnnnnnnnnnnnnnnnnnnnnnnnnnnnnnnnnnnnnnnnnnnnnnnnnnnnnnnnnnnnnnnnnnnnnnnnnnnnnnnnnnnnnnnnnnnnnnnnnnnnnnnnnnnnnnnnnnnnnnnnnnnnnnnnnnnnnnnnnnnnnnnnnnnnnnnnnnnnnnnnnnnnnnnnnnnnnnnnnnnnnnnnnnnnnnnnnnnnnnnnnnnnnnnnnnnnnnnnnnnnnnnnnnnnnnnnnnnnnnnnnnnnnnnnnnnnnnnnnnnnnnnnnnnnnnnnnnnnnnnnnnnnnnnnnnnnnnnnnnnnnnnnnnnnnnnnnnnnnnnnnnnnnnnnnnnnnnnnnnnnnnnnnnnnnnnnnnnnnnnnnnnnnnnnnnnnnnnnnnnnnnnnnnnnnnnnnnnnnnnnnnnnnnnnnnnnnnnnnnnnnnnnnnnnnnnnnnnnnnnnnnnnnnnnnnnnnnnnnnnnnnnnnnnnnnnnnnnnnnnnnnnnnnnnnnnnnnnnnnnnnnnnnnnnnnnnnnnnnnnnnnnnnnnnnnnnnnnnnnnnnnnnnnnnnnnnnnnnnnnnnnnnnnnnnnnnnnnnnnnnnnnnnnnnnnnnnnnnnnnnnnnnnnnnnnnnnnnnnnnnnnnnnnnnnnnnnnnnnnnnnnnnnnnnnnnnnnnnnnnnnnnnnnnnnnnnnnnnnnnnnnnnnnnnnnnnnnnnnnnnnnnnnnnnnnnnnnnnnnnnnnnnnnnnnnnnnnnnnnnnnnnnnnnnnnnnnnnnnnnnnnnnnnnnnnnnnnnnnnnnnnnnnnnnnnnnnnnnnnnnnnnnnnnnnnnnnnnnnnnnnnnnnnnnnnnnnnnnnnnnnnnnnnnnnnnnnnnnnnnnnnnnnnnnnnnnnnnnnnnnnnnnnnnnnnnnnnnnnnnnnnnnnnnnnnnnnnnnnnnnnnnnnnnnnnnnnnnnnnnnnnnnnnnnnnnnnnnnnnnnnnnnnnnnnnnnnnnnnnnnnnnnnnnnnnnnnnnnnnnnnnnnnnnnnnnnnnnnnnnnnnnnnnnnnnnnnnnnnnnnnnnnnnnnnnnnnnnnnnnnnnnnnnnnnnnnnnnnnnnnnnnnnnnnnnnnnnnnnnnnnnnnnnnnnnnnnnnnnnnnnnnnnnnnnnnnnnnnnnnnnnnnnnnnnnnnnnnnnnnnnnnnnnnnnnnnnnnnnnnnnnnnnnnnnnnnnnnnnnnnnnnnnnnnnnnnnnnnnnnnnnnnnnnnnnnnnnnnnnnnnnnnnnnnnnnnnnnnnnnnnnnnnnnnnnnnnnnnnnnnnnnnnnnnnnnnnnnnnnnnnnnnnnnnnnnnnnnnnnnnnnnnnnnnnnnnnnnnnnnnnnnnnnnnnnnnnnnnnnnnnnnnnnnnnnnnnnnnnnnnnnnnnnnnnnnnnnnnnnnnnnnnnnnnnnnnnnnnnnnnnnnnnnnnnnnnnnnnnnnnnnnnnnnnnnnnnnnnnnnnnnnnnnnnnnnnnnnnnnnnnnnnnnnnnnnnnnnnnnnnnnnnnnnnnnnnnnnnnnnnnnnnnnnnnnnnnnnnnnnnnnnnnnnnnnnnnnnnnnnnnnnnnnnnnnnnnnnnnnnnnnnnnnnnnnnnnnnnnnnnnnnnnnnnnnnnnnnnnnnnnnnnnnnnnnnnnnnnnnnnnnnnnnnnnnnnnnnnnnnnnnnnnnnnnnnnnnnnnnnnnnnnnnnnnnnnnnnnnnnnnnnnnnnnnnnnnnnnnnnnnnnnnnnnnnnnnnnnnnnnnnnnnnnnnnnnnnnnnnnnnnnnnnnnnnnnnnnnnnnnnnnnnnnnnnnnnnnnnnnnnnnnnnnnnnnnnnnnnnnnnnnnnnnnnnnnnnnnnnnnnnnnnnnnnnnnnnnnnnnnnnnnnnnnnnnnnnnnnnnnnnnnnnnnnnnnnnnnnnnnnnnnnnnnnnnnnnnnnnnnnnnnnnnnnnnnnnnnnnnnnnnnnnnnnnnnnnnnnnnnnnnnnnnnnnnnnnnnnnnnnnnnnnnnnnnnnnnnnnnnnnnnnnnnnnnnnnnnnnnnnnnnnnnnnnnnnnnnnnnnnnnnnnnnnnnnnnnnnnnnnnnnnnnnnnnnnnnnnnnnnnnnnnnnnnnnnnnnnnnnnnnnnnnnnnnnnnnnnnnnnnnnnnnnnnnnnnnnnnnnnnnnnnnnnnnnnnnnnnnnnnnnnnnnnnnnnnnnnnnnnnnnnnnnnnnnnnnnnnnnnnnnnnnnnnnnnnnnnnnnnnnnnnnnnnnnnnnnnnnnnnnnnnnnnnnnnnnnnnnnnnnnnnnnnnnnnnnnnnnnnnnnnnnnnnnnnnnnnnnnnnnnnnnnnnnnnnnnnnnnnnnnnnnnnnnnnnnnnnnnnnnnnnnnnnnnnnnnnnnnnnnnnnnnnnnnnnnnnnnnnnnnnnnnnnnnnnnnnnnnnnnnnnnnnnnnnnnnnnnnnnnnnnnnnnnnnnnnnnnnnnnnnnnnnnnnnnnnnnnnnnnnnnnnnnnnnnnnnnnnnnnnnnnnnnnnnnnnnnnnnnnnnnnnnnnnnnnnnnnnnnnnnnnnnnnnnnnnnnnnnnnnnnnnnnnnnnnnnnnnnnnnnnnnnnnnnnnnnnnnnnnnnnnnnnnnnnnnnnnnnnnnnnnnnnnnnnnnnnnnnnnnnnnnnnnnnnnnnnnnnnnnnnnnnnnnnnnnnnnnnnnnnnnnnnnnnnnnnnnnnnnnnnnnnnnnnnnnnnnnnnnnnnnnnnnnnnnnnnnnnnnnnnnnnnnnnnnnnnnnnnnnnnnnnnnnnnnnnnnnnnnnnnnnnnnnnnnnnnnnnnnnnnnnnnnnnnnnnnnnnnnnnnnnnnnnnnnnnnnnnnnnnnnnnnnnnnnnnnnnnnnnnnnnnnnnnnnnnnnnnnnnnnnnnnnnnnnnnnnnnnnnnnnnnnnnnnnnnnnnnnnnnnnnnnnnnnnnnnnnnnnnnnnnnnnnnnnnnnnnnnnnnnnnnnnnnnnnnnnnnnnnnnnnnnnnnnnnnnnnnnnnnnnnnnnnnnnnnnnnnnnnnnnnnnnnnnnnnnnnnnnnnnnnnnnnnnnnnnnnnnnnnnnnnnnnnnnnnnnnnnnnnnnnnnnnnnnnnnnnnnnnnnnnnnnnnnnnnnnnnnnnnnnnnnnnnnnnnnnnnnnnnnnnnnnnnnnnnnnnnnnnnnnnnnnnnnnnnnnnnnnnnnnnnnnnnnnnnnnnnnnnnnnnnnnnnnnnnnnnnnnnnnnnnnnnnnnnnnnnnnnnnnnnnnnnnnnnnnnnnnnnnnnnnnnnnnnnnnnnnnnnnnnnnnnnnnnnnnnnnnnnnnnnnnnnnnnnnnnnnnnnnnnnnnnnnnnnnnnnnnnnnnnnnnnnnnnnnnnnnnnnnnnnnnnnnnnnnnnnnnnnnnnnnnnnnnnnnnnnnnnnnnnnnnnnnnnnnnnnnnnnnnnnnnnnnnnnnnnnnnnnnnnnnnnnnnnnnnnnnnnnnnnnnnnnnnnnnnnnnnnnnnnnnnnnnnnnnnnnnnnnnnnnnnnnnnnnnnnnnnnnnnnnnnnnnnnnnnnnnnnnnnnnnnnnnnnnnnnnnnnnnnnnnnnnnnnnnnnnnnnnnnnnnnnnnnnnnnnnnnnnnnnnnnnnnnnnnnnnnnnnnnnnnnnnnnnnnnnnnnnnnnnnnnnnnnnnnnnnnnnnnnnnnnnnnnnnnnnnnnnnnnnnnnnnnnnnnnnnnnnnnnnnnnnnnnnnnnnnnnnnnnnnnnnnnnnnnnnnnnnnnnnnnnnnnnnnnnnnnnnnnnnnnnnnnnnnnnnnnnnnnnnnnnnnnnnnnnnnnnnnnnnnnnnnnnnnnnnnnnnnnnnnnnnnnnnnnnnnnnnnnnnnnnnnnnnnnnnnnnnnnnnnnnnnnnnnnnnnnnnnnnnnnnnnnnnnnnnnnnnnnnnnnnnnnnnnnnnnnnnnnnnnnnnnnnnnnnnnnnnnnnnnnnnnnnnnnnnnnnnnnnnnnnnnnnnnnnnnnnnnnnnnnnnnnnnnnnnnnnnnnnnnnnnnnnnnnnnnnnnnnnnnnnnnnnnnnnnnnnnnnnnnnnnnnnnnnnnnnnnnnnnnnnnnnnnnnnnnnnnnnnnnnnnnnnnnnnnnnnnnnnnnnnnnnnnnnnnnnnnnnnnnnnnnnnnnnnnnnnnnnnnnnnnnnnnnnnnnnnnnnnnnnnnnnnnnnnnnnnnnnnnnnnnnnnnnnnnnnnnnnnnnnnnnnnnnnnnnnnnnnnnnnnnnnnnnnnnnnnnnnnnnnnnnnnnnnnnnnnnnnnnnnnnnnnnnnnnnnnnnnnnnnnnnnnnnnnnnnnnnnnnnnnnnnnnnnnnnnnnnnnnnnnnnnnnnnnnnnnnnnnnnnnnnnnnnnnnnnnnnnnnnnnnnnnnnnnnnnnnnnnnnnnnnnnnnnnnnnnnnnnnnnnnnnnnnnnnnnnnnnnnnnnnnnnnnnnnnnnnnnnnnnnnnnnnnnnnnnnnnnnnnnnnnnnnnnnnnnnnnnnnnnnnnnnnnnnnnnnnnnnnnnnnnnnnnnnnnnnnnnnnnnnnnnnnnnnnnnnnnnnnnnnnnnnnnnnnnnnnnnnnnnnnnnnnnnnnnnnnnnnnnnnnnnnnnnnnnnnnnnnnnnnnnnnnnnnnnnnnnnnnnnnnnnnnnnnnnnnnnnnnnnnnnnnnnnnnnnnnnnnnnnnnnnnnnnnnnnnnnnnnnnnnnnnnnnnnnnnnnnnnnnnnnnnnnnnnnnnnnnnnnnnnnnnnnnnnnnnnnnnnnnnnnnnnnnnnnnnnnnnnnnnnnnnnnnnnnnnnnnnnnnnnnnnnnnnnnnnnnnnnnnnnnnnnnnnnnnnnnnnnnnnnnnnnnnnnnnnnnnnnnnnnnnnnnnnnnnnnnnnnnnnnnnnnnnnnnnnnnnnnnnnnnnnnnnnnnnnnnnnnnnnnnnnnnnnnnnnnnnnnnnnnnnnnnnnnnnnnnnnnnnnnnnnnnnnnnnnnnnnnnnnnnnnnnnnnnnnnnnnnnnnnnnnnnnnnnnnnnnnnnnnnnnnnnnnnnnnnnnnnnnnnnnnnnnnnnnnnnnnnnnnnnnnnnnnnnnnnnnnnnnnnnnnnnnnnnnnnnnnnnnnnnnnnnnnnnnnnnnnnnnnnnnnnnnnnnnnnnnnnnnnnnnnnnnnnnnnnnnnnnnnnnnnnnnnnnnnnnnnnnnnnnnnnnnnnnnnnnnnnnnnnnnnnnnnnnnnnnnnnnnnnnnnnnnnnnnnnnnnnnnnnnnnnnnnnnnnnnnnnnnnnnnnnnnnnnnnnnnnnnnnnnnnnnnnnnnnnnnnnnnnnnnnnnnnnnnnnnnnnnnnnnnnnnnnnnnnnnnnnnnnnnnnnnnnnnnnnnnnnnnnnnnnnnnnnnnnnnnnnnnnnnnnnnnnnnnnnnnnnnnnnnnnnnnnnnnnnnnnnnnnnnnnnnnnnnnnnnnnnnnnnnnnnnnnnnnnnnnnnnnnnnnnnnnnnnnnnnnnnnnnnnnnnnnnnnnnnnnnnnnnnnnnnnnnnnnnnnnnnnnnnnnnnnnnnnnnnnnnnnnnnnnnnnnnnnnnnnnnnnnnnnnnnnnnnnnnnnnnnnnnnnnnnnnnnnnnnnnnnnnnnnnnnnnnnnnnnnnnnnnnnnnnnnnnnnnnnnnnnnnnnnnnnnnnnnnnnnnnnnnnnnnnnnnnnnnnnnnnnnnnnnnnnnnnnnnnnnnnnnnnnnnnnnnnnnnnnnnnnnnnnnnnnnnnnnnnnnnnnnnnnnnnnnnnnnnnnnnnnnnnnnnnnnnnnnnnnnnnnnnnnnnnnnnnnnnnnnnnnnnnnnnnnnnnnnnnnnnnnnnnnnnnnnnnnnnnnnnnnnnnnnnnnnnnnnnnnnnnnnnnnnnnnnnnnnnnnnnnnnnnnnnnnnnnnnnnnnnnnnnnnnnnnnnnnnnnnnnnnnnnnnnnnnnnnnnnnnnnnnnnnnnnnnnnnnnnnnnnnnnnnnnnnnnnnnnnnnnnnnnnnnnnnnnnnnnnnnnnnnnnnnnnnnnnnnnnnnnnnnnnnnnnnnnnnnnnnnnnnnnnnnnnnnnnnnnnnnnnnnnnnnnnnnnnnnnnnnnnnnnnnnnnnnnnnnnnnnnnnnnnnnnnnnnnnnnnnnnnnnnnnnnnnnnnnnnnnnnnnnnnnnnnnnnnnnnnnnnnnnnnnnnnnnnnnnnnnnnnnnnnnnnnnnnnnnnnnnnnnnnnnnnnnnnnnnnnnnnnnnnnnnnnnnnnnnnnnnnnnnnnnnnnnnnnnnnnnnnnnnnnnnnnnnnnnnnnnnnnnnnnnnnnnnnnnnnnnnnnnnnnnnnnnnnnnnnnnnnnnnnnnnnnnnnnnnnnnnnnnnnnnnnnnnnnnnnnnnnnnnnnnnnnnnnnnnnnnnnnnnnnnnnnnnnnnnnnnnnnnnnnnnnnnnnnnnnnnnnnnnnnnnnnnnnnnnnnnnnnnnnnnnnnnnnnnnnnnnnnnnnnnnnnnnnnnnnnnnnnnnnnnnnnnnnnnnnnnnnnnnnnnnnnnnnnnnnnnnnnnnnnnnnnnnnnnnnnnnnnnnnnnnnnnnnnnnnnnnnnnnnnnnnnnnnnnnnnnnnnnnnnnnnnnnnnnnnnnnnnnnnnnnnnnnnnnnnnnnnnnnnnnnnnnnnnnnnnnnnnnnnnnnnnnnnnnnnnnnnnnnnnnnnnnnnnnnnnnnnnnnnnnnnnnnnnnnnnnnnnnnnnnnnnnnnnnnnnnnnnnnnnnnnnnnnnnnnnnnnnnnnnnnnnnnnnnnnnnnnnnnnnnnnnnnnnnnnnnnnnnnnnnnnnnnnnnnnnnnnnnnnnnnnnnnnnnnnnnnnnnnnnnnnnnnnnnnnnnnnnnnnnnnnnnnnnnnnnnnnnnnnnnnnnnnnnnnnnnnnnnnnnnnnnnnnnnnnnnnnnnnnnnnnnnnnnnnnnnnnnnnnnnnnnnnnnnnnnnnnnnnnnnnnnnnnnnnnnnnnnnnnnnnnnnnnnnnnnnnnnnnnnnnnnnnnnnnnnnnnnnnnnnnnnnnnnnnnnnnnnnnnnnnnnnnnnnnnnnnnnnnnnnnnnnnnnnnnnnnnnnnnnnnnnnnnnnnnnnnnnnnnnnnnnnnnnnnnnnnnnnnnnnnnnnnnnnnnnnnnnnnnnnnnnnnnnnnnnnnnnnnnnnnnnnnnnnnnnnnnnnnnnnnnnnnnnnnnnnnnnnnnnnnnnnnnnnnnnnnnnnnnnnnnnnnnnnnnnnnnnnnnnnnnnnnnnnnnnnnnnnnnnnnnnnnnnnnnnnnnnnnnnnnnnnnnnnnnnnnnnnnnnnnnnnnnnnnnnnnnnnnnnnnnnnnnnnnnnnnnnnnnnnnnnnnnnnnnnnnnnnnnnnnnnnnnnnnnnnnnnnnnnnnnnnnnnnnnnnnnnnnnnnnnnnnnnnnnnnnnnnnnnnnnnnnnnnnnnnnnnnnnnnnnnnnnnnnnnnnnnnnnnnnnnnnnnnnnnnnnnnnnnnnnnnnnnnnnnnnnnnnnnnnnnnnnnnnnnnnnnnnnnnnnnnnnnnnnnnnnnnnnnnnnnnnnnnnnnnnnnnnnnnnnnnnnnnnnnnnnnnnnnnnnnnnnnnnnnnnnnnnnnnnnnnnnnnnnnnnnnnnnnnnnnnnnnnnnnnnnnnnnnnnnnnnnnnnnnnnnnnnnnnnnnnnnnnnnnnnnnnnnnnnnnnnnnnnnnnnnnnnnnnnnnnnnnnnnnnnnnnnnnnnnnnnnnnnnnnnnnnnnnnnnnnnnnnnnnnnnnnnnnnnnnnnnnnnnnnnnnnnnnnnnnnnnnnnnnnnnnnnnnnnnnnnnnnnnnnnnnnnnnnnnnnnnnnnnnnnnnnnnnnnnnnnnnnnnnnnnnnnnnnnnnnnnnnnnnnnnnnnnnnnnnnnnnnnnnnnnnnnnnnnnnnnnnnnnnnnnnnnnnnnnnnnnnnnnnnnnnnnnnnnnnnnnnnnnnnnnnnnnnnnnnnnnnnnnnnnnnnnnnnnnnnnnnnnnnnnnnnnnnnnnnnnnnnnnnnnnnnnnnnnnnnnnnnnnnnnnnnnnnnnnnnnnnnnnnnnnnnnnnnnnnnnnnnnnnnnnnnnnnnnnnnnnnnnnnnnnnnnnnnnnnnnnnnnnnnnnnnnnnnnnnnnnnnnnnnnnnnnnnnnnnnnnnnnnnnnnnnnnnnnnnnnnnnnnnnnnnnnnnnnnnnnnnnnnnnnnnnnnnnnnnnnnnnnnnnnnnnnnnnnnnnnnnnnnnnnnnnnnnnnnnnnnnnnnnnnnnnnnnnnnnnnnnnnnnnnnnnnnnnnnnnnnnnnnnnnnnnnnnnnnnnnnnnnnnnnnnnnnnnnnnnnnnnnnnnnnnnnnnnnnnnnnnnnnnnnnnnnnnnnnnnnnnnnnnnnnnnnnnnnnnnnnnnnnnnnnnnnnnnnnnnnnnnnnnnnnnnnnnnnnnnnnnnnnnnnnnnnnnnnnnnnnnnnnnnnnnnnnnnnnnnnnnnnnnnnnnnnnnnnnnnnnnnnnnnnnnnnnnnnnnnnnnnnnnnnnnnnnnnnnnnnnnnnnnnnnnnnnnnnnnnnnnnnnnnnnnnnnnnnnnnnnnnnnnnnnnnnnnnnnnnnnnnnnnnnnnnnnnnnnnnnnnnnnnnnnnnnnnnnnnnnnnnnnnnnnnnnnnnnnnnnnnnnnnnnnnnnnnnnnnnnnnnnnnnnnnnnnnnnnnnnnnnnnnnnnnnnnnnnnnnnnnnnnnnnnnnnnnnnnnnnnnnnnnnnnnnnnnnnnnnnnnnnnnnnnnnnnnnnnnnnnnnnnnnnnnnnnnnnnnnnnnnnnnnnnnnnnnnnnnnnnnnnnnnnnnnnnnnnnnnnnnnnnnnnnnnnnnnnnnnnnnnnnnnnnnnnnnnnnnnnnnnnnnnnnnnnnnnnnnnnnnnnnnnnnnnnnnnnnnnnnnnnnnnnnnnnnnnnnnnnnnnnnnnnnnnnnnnnnnnnnnnnnnnnnnnnnnnnnnnnnnnnnnnnnnnnnnnnnnnnnnnnnnnnnnnnnnnnnnnnnnnnnnnnnnnnnnnnnnnnnnnnnnnnnnnnnnnnnnnnnnnnnnnnnnnnnnnnnnnnnnnnnnnnnnnnnnnnnnnnnnnnnnnnnnnnnnnnnnnnnnnnnnnnnnnnnnnnnnnnnnnnnnnnnnnnnnnnnnnnnnnnnnnnnnnnnnnnnnnnnnnnnnnnnnnnnnnnnnnnnnnnnnnnnnnnnnnnnnnnnnnnnnnnnnnnnnnnnnnnnnnnnnnnnnnnnnnnnnnnnnnnnnnnnnnnnnnnnnnnnnnnnnnnnnnnnnnnnnnnnnnnnnnnnnnnnnnnnnnnnnnnnnnnnnnnnnnnnnnnnnnnnnnnnnnnnnnnnnnnnnnnnnnnnnnnnnnnnnnnnnnnnnnnnnnnnnnnnnnnnnnnnnnnnnnnnnnnnnnnnnnnnnnnnnnnnnnnnnnnnnnnnnnnnnnnnnnnnnnnnnnnnnnnnnnnnnnnnnnnnnnnnnnnnnnnnnnnnnnnnnnnnnnnnnnnnnnnnnnnnnnnnnnnnnnnnnnnnnnnnnnnnnnnnnnnnnnnnnnnnnnnnnnnnnnnnnnnnnnnnnnnnnnnnnnnnnnnnnnnnnnnnnnnnnnnnnnnnnnnnnnnnnnnnnnnnnnnnnnnnnnnnnnnnnnnnnnnnnnnnnnnnnnnnnnnnnnnnnnnnnnnnnnnnnnnnnnnnnnnnnnnnnnnnnnnnnnnnnnnnnnnnnnnnnnnnnnnnnnnnnnnnnnnnnnnnnnnnnnnnnnnnnnnnnnnnnnnnnnnnnnnnnnnnnnnnnnnnnnnnnnnnnnnnnnnnnnnnnnnnnnnnnnnnnnnnnnnnnnnnnnnnnnnnnnnnnnnnnnnnnnnnnnnnnnnnnnnnnnnnnnnnnnnnnnnnnnnnnnnnnnnnnnnnnnnnnnnnnnnnnnnnnnnnnnnnnnnnnnnnnnnnnnnnnnnnnnnnnnnnnnnnnnnnnnnnnnnnnnnnnnnnnnnnnnnnnnnnnnnnnnnnnnnnnnnnnnnnnnnnnnnnnnnnnnnnnnnnnnnnnnnnnnnnnnnnnnnnnnnnnnnnnnnnnnnnnnnnnnnnnnnnnnnnnnnnnnnnnnnnnnnnnnnnnnnnnnnnnnnnnnnnnnnnnnnnnnnnnnnnnnnnnnnnnnnnnnnnnnnnnnnnnnnnnnnnnnnnnnnnnnnnnnnnnnnnnnnnnnnnnnnnnnnnnnnnnnnnnnnnnnnnnnnnnnnnnnnnnnnnnnnnnnnnnnnnnnnnnnnnnnnnnnnnnnnnnnnnnnnnnnnnnnnnnnnnnnnnnnnnnnnnnnnnnnnnnnnnnnnnnnnnnnnnnnnnnnnnnnnnnnnnnnnnnnnnnnnnnnnnnnnnnnnnnnnnnnnnnnnnnnnnnnnnnnnnnnnnnnnnnnnnnnnnnnnnnnnnnnnnnnnnnnnnnnnnnnnnnnnnnnnnnnnnnnnnnnnnnnnnnnnnnnnnnnnnnnnnnnnnnnnnnnnnnnnnnnnnnnnnnnnnnnnnnnnnnnnnnnnnnnnnnnnnnnnnnnnnnnnnnnnnnnnnnnnnnnnnnnnnnnnnnnnnnnnnnnnnnnnnnnnnnnnnnnnnnnnnnnnnnnnnnnnnnnnnnnnnnnnnnnnnnnnnnnnnnnnnnnnnnnnnnnnnnnnnnnnnnnnnnnnnnnnnnnnnnnnnnnnnnnnnnnnnnnnnnnnnnnnnnnnnnnnnnnnnnnnnnnnnnnnnnnnnnnnnnnnnnnnnnnnnnnnnnnnnnnnnnnnnnnnnnnnnnnnnnnnnnnnnnnnnnnnnnnnnnnnnnnnnnnnnnnnnnnnnnnnnnnnnnnnnnnnnnnnnnnnnnnnnnnnnnnnnnnnnnnnnnnnnnnnnnnnnnnnnnnnnnnnnnnnnnnnnnnnnnnnnnnnnnnnnnnnnnnnnnnnnnnnnnnnnnnnnnnnnnnnnnnnnnnnnnnnnnnnnnnnnnnnnnnnnnnnnnnnnnnnnnnnnnnnnnnnnnnnnnnnnnnnnnnnnnnnnnnnnnnnnnnnnnnnnnnnnnnnnnnnnnnnnnnnnnnnnnnnnnnnnnnnnnnnnnnnnnnnnnnnnnnnnnnnnnnnnnnnnnnnnnnnnnnnnnnnnnnnnnnnnnnnnnnnnnnnnnnnnnnnnnnnnnnnnnnnnnnnnnnnnnnnnnnnnnnnnnnnnnnnnnnnnnnnnnnnnnnnnnnnnnnnnnnnnnnnnnnnnnnnnnnnnnnnnnnnnnnnnnnnnnnnnnnnnnnnnnnnnnnnnnnnnnnnnnnnnnnnnnnnnnnnnnnnnnnnnnnnnnnnnnnnnnnnnnnnnnnnnnnnnnnnnnnnnnnnnnnnnnnnnnnnnnnnnnnnnnnnnnnnnnnnnnnnnnnnnnnnnnnnnnnnnnnnnnnnnnnnnnnnnnnnnnnnnnnnnnnnnnnnnnnnnnnnnnnnnnnnnnnnnnnnnnnnnnnnnnnnnnnnnnnnnnnnnnnnnnnnnnnnnnnnnnnnnnnnnnnnnnnnnnnnnnnnnnnnnnnnnnnnnnnnnnnnnnnnnnnnnnnnnnnnnnnnnnnnnnnnnnnnnnnnnnnnnnnnnnnnnnnnnnnnnnnnnnnnnnnnnnnnnnnnnnnnnnnnnnnnnnnnnnnnnnnnnnnnnnnnnnnnnnnnnnnnnnnnnnnnnnnnnnnnnnnnnnnnnnnnnnnnnnnnnnnnnnnnnnnnnnnnnnnnnnnnnnnnnnnnnnnnnnnnnnnnnnnnnnnnnnnnnnnnnnnnnnnnnnnnnnnnnnnnnnnnnnnnnnnnnnnnnnnnnnnnnnnnnnnnnnnnnnnnnnnnnnnnnnnnnnnnnnnnnnnnnnnnnnnnnnnnnnnnnnnnnnnnnnnnnnnnnnnnnnnnnnnnnnnnnnnnnnnnnnnnnnnnnnnnnnnnnnnnnnnnnnnnnnnnnnnnnnnnnnnnnnnnnnnnnnnnnnnnnnnnnnnnnnnnnnnnnnnnnnnnnnnnnnnnnnnnnnnnnnnnnnnnnnnnnnnnnnnnnnnnnnnnnnnnnnnnnnnnnnnnnnnnnnnnnnnnnnnnnnnnnnnnnnnnnnnnnnnnnnnnnnnnnnnnnnnnnnnnnnnnnnnnnnnnnnnnnnnnnnnnnnnnnnnnnnnnnnnnnnnnnnnnnnnnnnnnnnnnnnnnnnnnnnnnnnnnnnnnnnnnnnnnnnnnnnnnnnnnnnnnnnnnnnnnnnnnnnnnnnnnnnnnnnnnnnnnnnnnnnnnnnnnnnnnnnnnnnnnnnnnnnnnnnnnnnnnnnnnnnnnnnnnnnnnnnnnnnnnnnnnnnnnnnnnnnnnnnnnnnnnnnnnnnnnnnnnnnnnnnnnnnnnnnnnnnnnnnnnnnnnnnnnnnnnnnnnnnnnnnnnnnnnnnnnnnnnnnnnnnnnnnnnnnnnnnnnnnnnnnnnnnnnnnnnnnnnnnnnnnnnnnnnnnnnnnnnnnnnnnnnnnnnnnnnnnnnnnnnnnnnnnnnnnnnnnnnnnnnnnnnnnnnnnnnnnnnnnnnnnnnnnnnnnnnnnnnnnnnnnnnnnnnnnnnnnnnnnnnnnnnnnnnnnnnnnnnnnnnnnnnnnnnnnnnnnnnnnnnnnnnnnnnnnnnnnnnnnnnnnnnnnnnnnnnnnnnnnnnnnnnnnnnnnnnnnnnnnnnnnnnnnnnnnnnnnnnnnnnnnnnnnnnnnnnnnnnnnnnnnnnnnnnnnnnnnnnnnnnnnnnnnnnnnnnnnnnnnnnnnnnnnnnnnnnnnnnnnnnnnnnnnnnnnnnnnnnnnnnnnnnnnnnnnnnnnnnnnnnnnnnnnnnnnnnnnnnnnnnnnnnnnnnnnnnnnnnnnnnnnnnnnnnnnnnnnnnnnnnnnnnnnnnnnnnnnnnnnnnnnnnnnnnnnnnnnnnnnnnnnnnnnnnnnnnnnnnnnnnnnnnnnnnnnnnnnnnnnnnnnnnnnnnnnnnnnnnnnnnnnnnnnnnnnnnnnnnnnnnnnnnnnnnnnnnnnnnnnnnnnnnnnnnnnnnnnnnnnnnnnnnnnnnnnnnnnnnnnnnnnnnnnnnnnnnnnnnnnnnnnnnnnnnnnnnnnnnnnnnnnnnnnnnnnnnnnnnnnnnnnnnnnnnnnnnnnnnnnnnnnnnnnnnnnnnnnnnnnnnnnnnnnnnnnnnnnnnnnnnnnnnnnnnnnnnnnnnnnnnnnnnnnnnnnnnnnnnnnnnnnnnnnnnnnnnnnnnnnnnnnnnnnnnnnnnnnnnnnnnnnnnnnnnnnnnnnnnnnnnnnnnnnnnnnnnnnnnnnnnnnnnnnnnnnnnnnnnnnnnnnnnnnnnnnnnnnnnnnnnnnnnnnnnnnnnnnnnnnnnnnnnnnnnnnnnnnnnnnnnnnnnnnnnnnnnnnnnnnnnnnnnnnnnnnnnnnnnnnnnnnnnnnnnnnnnnnnnnnnnnnnnnnnnnnnnnnnnnnnnnnnnnnnnnnnnnnnnnnnnnnnnnnnnnnnnnnnnnnnnnnnnnnnnnnnnnnnnnnnnnnnnnnnnnnnnnnnnnnnnnnnnnnnnnnnnnnnnnnnnnnnnnnnnnnnnnnnnnnnnnnnnnnnnnnnnnnnnnnnnnnnnnnnnnnnnnnnnnnnnnnnnnnnnnnnnnnnnnnnnnnnnnnnnnnnnnnnnnnnnnnnnnnnnnnnnnnnnnnnnnnnnnnnnnnnnnnnnnnnnnnnnnnnnnnnnnnnnnnnnnnnnnnnnnnnnnnnnnnnnnnnnnnnnnnnnnnnnnnnnnnnnnnnnnnnnnnnnnnnnnnnnnnnnnnnnnnnnnnnnnnnnnnnnnnnnnnnnnnnnnnnnnnnnnnnnnnnnnnnnnnnnnnnnnnnnnnnnnnnnnnnnnnnnnnnnnnnnnnnnnnnnnnnnnnnnnnnnnnnnnnnnnnnnnnnnnnnnnnnnnnnnnnnnnnnnnnnnnnnnnnnnnnnnnnnnnnnnnnnnnnnnnnnnnnnnnnnnnnnnnnnnnnnnnnnnnnnnnnnnnnnnnnnnnnnnnnnnnnnnnnnnnnnnnnnnnnnnnnnnnnnnnnnnnnnnnnnnnnnnnnnnnnnnnnnnnnnnnnnnnnnnnnnnnnnnnnnnnnnnnnnnnnnnnnnnnnnnnnnnnnnnnnnnnnnnnnnnnnnnnnnnnnnnnnnnnnnnnnnnnnnnnnnnnnnnnnnnnnnnnnnnnnnnnnnnnnnnnnnnnnnnnnnnnnnnnnnnnnnnnnnnnnnnnnnnnnnnnnnnnnnnnnnnnnnnnnnnnnnnnnnnnnnnnnnnnnnnnnnnnnnnnnnnnnnnnnnnnnnnnnnnnnnnnnnnnnnnnnnnnnnnnnnnnnnnnnnnnnnnnnnnnnnnnnnnnnnnnnnnnnnnnnnnnnnnnnnnnnnnnnnnnnnnnnnnnnnnnnnnnnnnnnnnnnnnnnnnnnnnnnnnnnnnnnnnnnnnnnnnnnnnnnnnnnnnnnnnnnnnnnnnnnnnnnnnnnnnnnnnnnnnnnnnnnnnnnnnnnnnnnnnnnnnnnnnnnnnnnnnnnnnnnnnnnnnnnnnnnnnnnnnnnnnnnnnnnnnnnnnnnnnnnnnnnnnnnnnnnnnnnnnnnnnnnnnnnnnnnnnnnnnnnnnnnnnnnnnnnnnnnnnnnnnnnnnnnnnnnnnnnnnnnnnnnnnnnnnnnnnnnnnnnnnnnnnnnnnnnnnnnnnnnnnnnnnnnnnnnnnnnnnnnnnnnnnnnnnnnnnnnnnnnnnnnnnnnnnnnnnnnnnnnnnnnnnnnnnnnnnnnnnnnnnnnnnnnnnnnnnnnnnnnnnnnnnnnnnnnnnnnnnnnnnnnnnnnnnnnnnnnnnnnnnnnnnnnnnnnnnnnnnnnnnnnnnnnnnnnnnnnnnnnnnnnnnnnnnnnnnnnnnnnnnnnnnnnnnnnnnnnnnnnnnnnnnnnnnnnnnnnnnnnnnnnnnnnnnnnnnnnnnnnnnnnnnnnnnnnnnnnnnnnnnnnnnnnnnnnnnnnnnnnnnnnnnnnnnnnnnnnnnnnnnnnnnnnnnnnnnnnnnnnnnnnnnnnnnnnnnnnnnnnnnnnnnnnnnnnnnnnnnnnnnnnnnnnnnnnnnnnnnnnnnnnnnnnnnnnnnnnnnnnnnnnnnnnnnnnnnnnnnnnnnnnnnnnnnnnnnnnnnnnnnnnnnnnnnnnnnnnnnnnnnnnnnnnnnnnnnnnnnnnnnnnnnnnnnnnnnnnnnnnnnnnnnnnnnnnnnnnnnnnnnnnnnnnnnnnnnnnnnnnnnnnnnnnnnnnnnnnnnnnnnnnnnnnnnnnnnnnnnnnnnnnnnnnnnnnnnnnnnnnnnnnnnnnnnnnnnnnnnnnnnnnnnnnnnnnnnnnnnnnnnnnnnnnnnnnnnnnnnnnnnnnnnnnnnnnnnnnnnnnnnnnnnnnnnnnnnnnnnnnnnnnnnnnnnnnnnnnnnnnnnnnnnnnnnnnnnnnnnnnnnnnnnnnnnnnnnnnnnnnnnnnnnnnnnnnnnnnnnnnnnnnnnnnnnnnnnnnnnnnnnnnnnnnnnnnnnnnnnnnnnnnnnnnnnnnnnnnnnnnnnnnnnnnnnnnnnnnnnnnnnnnnnnnnnnnnnnnnnnnnnnnnnnnnnnnnnnnnnnnnnnnnnnnnnnnnnnnnnnnnnnnnnnnnnnnnnnnnnnnnnnnnnnnnnnnnnnnnnnnnnnnnnnnnnnnnnnnnnnnnnnnnnnnnnnnnnnnnnnnnnnnnnnnnnnnnnnnnnnnnnnnnnnnnnnnnnnnnnnnnnnnnnnnnnnnnnnnnnnnnnnnnnnnnnnnnnnnnnnnnnnnnnnnnnnnnnnnnnnnnnnnnnnnnnnnnnnnnnnnnnnnnnnnnnnnnnnnnnnnnnnnnnnnnnnnnnnnnnnnnnnnnnnnnnnnnnnnnnnnnnnnnnnnnnnnnnnnnnnnnnnnnnnnnnnnnnnnnnnnnnnnnnnnnnnnnnnnnnnnnnnnnnnnnnnnnnnnnnnnnnnnnnnnnnnnnnnnnnnnnnnnnnnnnnnnnnnnnnnnnnnnnnnnnnnnnnnnnnnnnnnnnnnnnnnnnnnnnnnnnnnnnnnnnnnnnnnnnnnnnnnnnnnnnnnnnnnnnnnnnnnnnnnnnnnnnnnnnnnnnnnnnnnnnnnnnnnnnnnnnnnnnnnnnnnnnnnnnnnnnnnnnnnnnnnnnnnnnnnnnnnnnnnnnnnnnnnnnnnnnnnnnnnnnnnnnnnnnnnnnnnnnnnnnnnnnnnnnnnnnnnnnnnnnnnnnnnnnnnnnnnnnnnnnnnnnnnnnnnnnnnnnnnnnnnnnnnnnnnnnnnnnnnnnnnnnnnnnnnnnnnnnnnnnnnnnnnnnnnnnnnnnnnnnnnnnnnnnnnnnnnnnnnnnnnnnnnnnnnnnnnnnnnnnnnnnnnnnnnnnnnnnnnnnnnnnnnnnnnnnnnnnnnnnnnnnnnnnnnnnnnnnnnnnnnnnnnnnnnnnnnnnnnnnnnnnnnnnnnnnnnnnnnnnnnnnnnnnnnnnnnnnnnnnnnnnnnnnnnnnnnnnnnnnnnnnnnnnnnnnnnnnnnnnnnnnnnnnnnnnnnnnnnnnnnnnnnnnnnnnnnnnnnnnnnnnnnnnnnnnnnnnnnnnnnnnnnnnnnnnnnnnnnnnnnnnnnnnnnnnnnnnnnnnnnnnnnnnnnnnnnnnnnnnnnnnnnnnnnnnnnnnnnnnnnnnnnnnnnnnnnnnnnnnnnnnnnnnnnnnnnnnnnnnnnnnnnnnnnnnnnnnnnnnnnnnnnnnnnnnnnnnnnnnnnnnnnnnnnnnnnnnnnnnnnnnnnnnnnnnnnnnnnnnnnnnnnnnnnnnnnnnnnnnnnnnnnnnnnnnnnnnnnnnnnnnnnnnnnnnnnnnnnnnnnnnnnnnnnnnnnnnnnnnnnnnnnnnnnnnnnnnnnnnnnnnnnnnnnnnnnnnnnnnnnnnnnnnnnnnnnnnnnnnnnnnnnnnnnnnnnnnnnnnnnnnnnnnnnnnnnnnnnnnnnnnnnnnnnnnnnnnnnnnnnnnnnnnnnnnnnnnnnnnnnnnnnnnnnnnnnnnnnnnnnnnnnnnnnnnnnnnnnnnnnnnnnnnnnnnnnnnnnnnnnnnnnnnnnnnnnnnnnnnnnnnnnnnnnnnnnnnnnnnnnnnnnnnnnnnnnnnnnnnnnnnnnnnnnnnnnnnnnnnnnnnnnnnnnnnnnnnnnnnnnnnnnnnnnnnnnnnnnnnnnnnnnnnnnnnnnnnnnnnnnnnnnnnnnnnnnnnnnnnnnnnnnnnnnnnnnnnnnnnnnnnnnnnnnnnnnnnnnnnnnnnnnnnnnnnnnnnnnnnnnnnnnnnnnnnnnnnnnnnnnnnnnnnnnnnnnnnnnnnnnnnnnnnnnnnnnnnnnnnnnnnnnnnnnnnnnnnnnnnnnnnnnnnnnnnnnnnnnnnnnnnnnnnnnnnnnnnnnnnnnnnnnnnnnnnnnnnnnnnnnnnnnnnnnnnnnnnnnnnnnnnnnnnnnnnnnnnnnnnnnnnnnnnnnnnnnnnnnnnnnnnnnnnnnnnnnnnnnnnnnnnnnnnnnnnnnnnnnnnnnnnnnnnnnnnnnnnnnnnnnnnnnnnnnnnnnnnnnnnnnnnnnnnnnnnnnnnnnnnnnnnnnnnnnnnnnnnnnnnnnnnnnnnnnnnnnnnnnnnnnnnnnnnnnnnnnnnnnnnnnnnnnnnnnnnnnnnnnnnnnnnnnnnnnnnnnnnnnnnnnnnnnnnnnnnnnnnnnnnnnnnnnnnnnnnnnnnnnnnnnnnnnnnnnnnnnnnnnnnnnnnnnnnnnnnnnnnnnnnnnnnnnnnnnnnnnnnnnnnnnnnnnnnnnnnnnnnnnnnnnnnnnnnnnnnnnnnnnnnnnnnnnnnnnnnnnnnnnnnnnnnnnnnnnnnnnnnnnnnnnnnnnnnnnnnnnnnnnnnnnnnnnnnnnnnnnnnnnnnnnnnnnnnnnnnnnnnnnnnnnnnnnnnnnnnnnnnnnnnnnnnnnnnnnnnnnnnnnnnnnnnnnnnnnnnnnnnnnnnnnnnnnnnnnnnnnnnnnnnnnnnnnnnnnnnnnnnnnnnnnnnnnnnnnnnnnnnnnnnnnnnnnnnnnnnnnnnnnnnnnnnnnnnnnnnnnnnnnnnnnnnnnnnnnnnnnnnnnnnnnnnnnnnnnnnnnnnnnnnnnnnnnnnnnnnnnnnnnnnnnnnnnnnnnnnnnnnnnnnnnnnnnnnnnnnnnnnnnnnnnnnnnnnnnnnnnnnnnnnnnnnnnnnnnnnnnnnnnnnnnnnnnnnnnnnnnnnnnnnnnnnnnnnnnnnnnnnnnnnnnnnnnnnnnnnnnnnnnnnnnnnnnnnnnnnnnnnnnnnnnnnnnnnnnnnnnnnnnnnnnnnnnnnnnnnnnnnnnnnnnnnnnnnnnnnnnnnnnnnnnnnnnnnnnnnnnnnnnnnnnnnnnnnnnnnnnnnnnnnnnnnnnnnnnnnnnnnnnnnnnnnnnnnnnnnnnnnnnnnnnnnnnnnnnnnnnnnnnnnnnnnnnnnnnnnnnnnnnnnnnnnnnnnnnnnnnnnnnnnnnnnnnnnnnnnnnnnnnnnnnnnnnnnnnnnnnnnnnnnnnnnnnnnnnnnnnnnnnnnnnnnnnnnnnnnnnnnnnnnnnnnnnnnnnnnnnnnnnnnnnnnnnnnnnnnnnnnnnnnnnnnnnnnnnnnnnnnnnnnnnnnnnnnnnnnnnnnnnnnnnnnnnnnnnnnnnnnnnnnnnnnnnnnnnnnnnnnnnnnnnnnnnnnnnnnnnnnnnnnnnnnnnnnnnnnnnnnnnnnnnnnnnnnnnnnnnnnnnnnnnnnnnnnnnnnnnnnnnnnnnnnnnnnnnnnnnnnnnnnnnnnnnnnnnnnnnnnnnnnnnnnnnnnnnnnnnnnnnnnnnnnnnnnnnnnnnnnnnnnnnnnnnnnnnnnnnnnnnnnnnnnnnnnnnnnnnnnnnnnnnnnnnnnnnnnnnnnnnnnnnnnnnnnnnnnnnnnnnnnnnnnnnnnnnnnnnnnnnnnnnnnnnnnnnnnnnnnnnnnnnnnnnnnnnnnnnnnnnnnnnnnnnnnnnnnnnnnnnnnnnnnnnnnnnnnnnnnnnnnnnnnnnnnnnnnnnnnnnnnnnnnnnnnnnnnnnnnnnnnnnnnnnnnnnnnnnnnnnnnnnnnnnnnnnnnnnnnnnnnnnnnnnnnnnnnnnnnnnnnnnnnnnnnnnnnnnnnnnnnnnnnnnnnnnnnnnnnnnnnnnnnnnnnnnnnnnnnnnnnnnnnnnnnnnnnnnnnnnnnnnnnnnnnnnnnnnnnnnnnnnnnnnnnnnnnnnnnnnnnnnnnnnnnnnnnnnnnnnnnnnnnnnnnnnnnnnnnnnnnnnnnnnnnnnnnnnnnnnnnnnnnnnnnnnnnnnnnnnnnnnnnnnnnnnnnnnnnnnnnnnnnnnnnnnnnnnnnnnnnnnnnnnnnnnnnnnnnnnnnnnnnnnnnnnnnnnnnnnnnnnnnnnnnnnnnnnnnnnnnnnnnnnnnnnnnnnnnnnnnnnnnnnnnnnnnnnnnnnnnnnnnnnnnnnnnnnnnnnnnnnnnnnnnnnnnnnnnnnnnnnnnnnnnnnnnnnnnnnnnnnnnnnnnnnnnnnnnnnnnnnnnnnnnnnnnnnnnnnnnnnnnnnnnnnnnnnnnnnnnnnnnnnnnnnnnnnnnnnnnnnnnnnnnnnnnnnnnnnnnnnnnnnnnnnnnnnnnnnnnnnnnnnnnnnnnnnnnnnnnnnnnnnnnnnnnnnnnnnnnnnnnnnnnnnnnnnnnnnnnnnnnnnnnnnnnnnnnnnnnnnnnnnnnnnnnnnnnnnnnnnnnnnnnnnnnnnnnnnnnnnnnnnnnnnnnnnnnnnnnnnnnnnnnnnnnnnnnnnnnnnnnnnnnnnnnnnnnnnnnnnnnnnnnnnnnnnnnnnnnnnnnnnnnnnnnnnnnnnnnnnnnnnnnnnnnnnnnnnnnnnnnnnnnnnnnnnnnnnnnnnnnnnnnnnnnnnnnnnnnnnnnnnnnnnnnnnnnnnnnnnnnnnnnnnnnnnnnnnnnnnnnnnnnnnnnnnnnnnnnnnnnnnnnnnnnnnnnnnnnnnnnnnnnnnnnnnnnnnnnnnnnnnnnnnnnnnnnnnnnnnnnnnnnnnnnnnnnnnnnnnnnnnnnnnnnnnnnnnnnnnnnnnnnnnnnnnnnnnnnnnnnnnnnnnnnnnnnnnnnnnnnnnnnnnnnnnnnnnnnnnnnnnnnnnnnnnnnnnnnnnnnnnnnnnnnnnnnnnnnnnnnnnnnnnnnnnnnnnnnnnnnnnnnnnnnnnnnnnnnnnnnnnnnnnnnnnnnnnnnnnnnnnnnnnnnnnnnnnnnnnnnnnnnnnnnnnnnnnnnnnnnnnnnnnnnnnnnnnnnnnnnnnnnnnnnnnnnnnnnnnnnnnnnnnnnnnnnnnnnnnnnnnnnnnnnnnnnnnnnnnnnnnnnnnnnnnnnnnnnnnnnnnnnnnnnnnnnnnnnnnnnnnnnnnnnnnnnnnnnnnnnnnnnnnnnnnnnnnnnnnnnnnnnnnnnnnnnnnnnnnnnnnnnnnnnnnnnnnnnnnnnnnnnnnnnnnnnnnnnnnnnnnnnnnnnnnnnnnnnnnnnnnnnnnnnnnnnnnnnnnnnnnnnnnnnnnnnnnnnnnnnnnnnnnnnnnnnnnnnnnnnnnnnnnnnnnnnnnnnnnnnnnnnnnnnnnnnnnnnnnnnnnnnnnnnnnnnnnnnnnnnnnnnnnnnnnnnnnnnnnnnnnnnnnnnnnnnnnnnnnnnnnnnnnnnnnnnnnnnnnnnnnnnnnnnnnnnnnnnnnnnnnnnnnnnnnnnnnnnnnnnnnnnnnnnnnnnnnnnnnnnnnnnnnnnnnnnnnnnnnnnnnnnnnnnnnnnnnnnnnnnnnnnnnnnnnnnnnnnnnnnnnnnnnnnnnnnnnnnnnnnnnnnnnnnnnnnnnnnnnnnnnnnnnnnnnnnnnnnnnnnnnnnnnnnnnnnnnnnnnnnnnnnnnnnnnnnnnnnnnnnnnnnnnnnnnnnnnnnnnnnnnnnnnnnnnnnnnnnnnnnnnnnnnnnnnnnnnnnnnnnnnnnnnnnnnnnnnnnnnnnnnnnnnnnnnnnnnnnnnnnnnnnnnnnnnnnnnnnnnnnnnnnnnnnnnnnnnnnnnnnnnnnnnnnnnnnnnnnnnnnnnnnnnnnnnnnnnnnnnnnnnnnnnnnnnnnnnnnnnnnnnnnnnnnnnnnnnnnnnnnnnnnnnnnnnnnnnnnnnnnnnnnnnnnnnnnnnnnnnnnnnnnnnnnnnnnnnnnnnnnnnnnnnnnnnnnnnnnnnnnnnnnnnnnnnnnnnnnnnnnnnnnnnnnnnnnnnnnnnnnnnnnnnnnnnnnnnnnnnnnnnnnnnnnnnnnnnnnnnnnnnnnnnnnnnnnnnnnnnnnnnnnnnnnnnnnnnnnnnnnnnnnnnnnnnnnnnnnnnnnnnnnnnnnnnnnnnnnnnnnnnnnnnnnnnnnnnnnnnnnnnnnnnnnnnnnnnnnnnnnnnnnnnnnnnnnnnnnnnnnnnnnnnnnnnnnnnnnnnnnnnnnnnnnnnnnnnnnnnnnnnnnnnnnnnnnnnnnnnnnnnnnnnnnnnnnnnnnnnnnnnnnnnnnnnnnnnnnnnnnnnnnnnnnnnnnnnnnnnnnnnnnnnnnnnnnnnnnnnnnnnnnnnnnnnnnnnnnnnnnnnnnnnnnnnnnnnnnnnnnnnnnnnnnnnnnnnnnnnnnnnnnnnnnnnnnnnnnnnnnnnnnnnnnnnnnnnnnnnnnnnnnnnnnnnnnnnnnnnnnnnnnnnnnnnnnnnnnnnnnnnnnnnnnnnnnnnnnnnnnnnnnnnnnnnnnnnnnnnnnnnnnnnnnnnnnnnnnnnnnnnnnnnnnnnnnnnnnnnnnnnnnnnnnnnnnnnnnnnnnnnnnnnnnnnnnnnnnnnnnnnnnnnnnnnnnnnnnnnnnnnnnnnnnnnnnnnnnnnnnnnnnnnnnnnnnnnnnnnnnnnnnnnnnnnnnnnnnnnnnnnnnnnnnnnnnnnnnnnnnnnnnnnnnnnnnnnnnnnnnnnnnnnnnnnnnnnnnnnnnnnnnnnnnnnnnnnnnnnnnnnnnnnnnnnnnnnnnnnnnnnnnnnnnnnnnnnnnnnnnnnnnnnnnnnnnnnnnnnnnnnnnnnnnnnnnnnnnnnnnnnnnnnnnnnnnnnnnnnnnnnnnnnnnnnnnnnnnnnnnnnnnnnnnnnnnnnnnnnnnnnnnnnnnnnnnnnnnnnnnnnnnnnnnnnnnnnnnnnnnnnnnnnnnnnnnnnnnnnnnnnnnnnnnnnnnnnnnnnnnnnnnnnnnnnnnnnnnnnnnnnnnnnnnnnnnnnnnnnnnnnnnnnnnnnnnnnnnnnnnnnnnnnnnnnnnnnnnnnnnnnnnnnnnnnnnnnnnnnnnnnnnnnnnnnnnnnnnnnnnnnnnnnnnnnnnnnnnnnnnnnnnnnnnnnnnnnnnnnnnnnnnnnnnnnnnnnnnnnnnnnnnnnnnnnnnnnnnnnnnnnnnnnnnnnnnnnnnnnnnnnnnnnnnnnnnnnnnnnnnnnnnnnnnnnnnnnnnnnnnnnnnnnnnnnnnnnnnnnnnnnnnnnnnnnnnnnnnnnnnnnnnnnnnnnnnnnnnnnnnnnnnnnnnnnnnnnnnnnnnnnnnnnnnnnnnnnnnnnnnnnnnnnnnnnnnnnnnnnnnnnnnnnnnnnnnnnnnnnnnnnnnnnnnnnnnnnnnnnnnnnnnnnnnnnnnnnnnnnnnnnnnnnnnnnnnnnnnnnnnnnnnnnnnnnnnnnnnnnnnnnnnnnnnnnnnnnnnnnnnnnnnnnnnnnnnnnnnnnnnnnnnnnnnnnnnnnnnnnnnnnnnnnnnnnnnnnnnnnnnnnnnnnnnnnnnnnnnnnnnnnnnnnnnnnnnnnnnnnnnnnnnnnnnnnnnnnnnnnnnnnnnnnnnnnnnnnnnnnnnnnnnnnnnnnnnnnnnnnnnnnnnnnnnnnnnnnnnnnnnnnnnnnnnnnnnnnnnnnnnnnnnnnnnnnnnnnnnnnnnnnnnnnnnnnnnnnnnnnnnnnnnnnnnnnnnnnnnnnnnnnnnnnnnnnnnnnnnnnnnnnnnnnnnnnnnnnnnnnnnnnnnnnnnnnnnnnnnnnnnnnnnnnnnnnnnnnnnnnnnnnnnnnnnnnnnnnnnnnnnnnnnnnnnnnnnnnnnnnnnnnnnnnnnnnnnnnnnnnnnnnnnnnnnnnnnnnnnnnnnnnnnnnnnnnnnnnnnnnnnnnnnnnnnnnnnnnnnnnnnnnnnnnnnnnnnnnnnnnnnnnnnnnnnnnnnnnnnnnnnnnnnnnnnnnnnnnnnnnnnnnnnnnnnnnnnnnnnnnnnnnnnnnnnnnnnnnnnnnnnnnnnnnnnnnnnnnnnnnnnnnnnnnnnnnnnnnnnnnnnnnnnnnnnnnnnnnnnnnnnnnnnnnnnnnnnnnnnnnnnnnnnnnnnnnnnnnnnnnnnnnnnnnnnnnnnnnnnnnnnnnnnnnnnnnnnnnnnnnnnnnnnnnnnnnnnnnnnnnnnnnnnnnnnnnnnnnnnnnnnnnnnnnnnnnnnnnnnnnnnnnnnnnnnnnnnnnnnnnnnnnnnnnnnnnnnnnnnnnnnnnnnnnnnnnnnnnnnnnnnnnnnnnnnnnnnnnnnnnnnnnnnnnnnnnnnnnnnnnnnnnnnnnnnnnnnnnnnnnnnnnnnnnnnnnnnnnnnnnnnnnnnnnnnnnnnnnnnnnnnnnnnnnnnnnnnnnnnnnnnnnnnnnnnnnnnnnnnnnnnnnnnnnnnnnnnnnnnnnnnnnnnnnnnnnnnnnnnnnnnnnnnnnnnnnnnnnnnnnnnnnnnnnnnnnnnnnnnnnnnnnnnnnnnnnnnnnnnnnnnnnnnnnnnnnnnnnnnnnnnnnnnnnnnnnnnnnnnnnnnnnnnnnnnnnnnnnnnnnnnnnnnnnnnnnnnnnnnnnnnnnnnnnnnnnnnnnnnnnnnnnnnnnnnnnnnnnnnnnnnnnnnnnnnnnnnnnnnnnnnnnnnnnnnnnnnnnnnnnnnnnnnnnnnnnnnnnnnnnnnnnnnnnnnnnnnnnnnnnnnnnnnnnnnnnnnnnnnnnnnnnnnnnnnnnnnnnnnnnnnnnnnnnnnnnnnnnnnnnnnnnnnnnnnnnnnnnnnnnnnnnnnnnnnnnnnnnnnnnnnnnnnnnnnnnnnnnnnnnnnnnnnnnnnnnnnnnnnnnnnnnnnnnnnnnnnnnnnnnnnnnnnnnnnnnnnnnnnnnnnnnnnnnnnnnnnnnnnnnnnnnnnnnnnnnnnnnnnnnnnnnnnnnnnnnnnnnnnnnnnnnnnnnnnnnnnnnnnnnnnnnnnnnnnnnnnnnnnnnnnnnnnnnnnnnnnnnnnnnnnnnnnnnnnnnnnnnnnnnnnnnnnnnnnnnnnnnnnnnnnnnnnnnnnnnnnnnnnnnnnnnnnnnnnnnnnnnnnnnnnnnnnnnnnnnnnnnnnnnnnnnnnnnnnnnnnnnnnnnnnnnnnnnnnnnnnnnnnnnnnnnnnnnnnnnnnnnnnnnnnnnnnnnnnnnnnnnnnnnnnnnnnnnnnnnnnnnnnnnnnnnnnnnnnnnnnnnnnnnnnnnnnnnnnnnnnnnnnnnnnnnnnnnnnnnnnnnnnnnnnnnnnnnnnnnnnnnnnnnnnnnnnnnnnnnnnnnnnnnnnnnnnnnnnnnnnnnnnnnnnnnnnnnnnnnnnnnnnnnnnnnnnnnnnnnnnnnnnnnnnnnnnnnnnnnnnnnnnnnnnnnnnnnnnnnnnnnnnnnnnnnnnnnnnnnnnnnnnnnnnnnnnnnnnnnnnnnnnnnnnnnnnnnnnnnnnnnnnnnnnnnnnnnnnnnnnnnnnnnnnnnnnnnnnnnnnnnnnnnnnnnnnnnnnnnnnnnnnnnnnnnnnnnnnnnnnnnnnnnnnnnnnnnnnnnnnnnnnnnnnnnnnnnnnnnnnnnnnnnnnnnnnnnnnnnnnnnnnnnnnnnnnnnnnnnnnnnnnnnnnnnnnnnnnnnnnnnnnnnnnnnnnnnnnnnnnnnnnnnnnnnnnnnnnnnnnnnnnnnnnnnnnnnnnnnnnnnnnnnnnnnnnnnnnnnnnnnnnnnnnnnnnnnnnnnnnnnnnnnnnnnnnnnnnnnnnnnnnnnnnnnnnnnnnnnnnnnnnnnnnnnnnnnnnnnnnnnnnnnnnnnnnnnnnnnnnnnnnnnnnnnnnnnnnnnnnnnnnnnnnnnnnnnnnnnnnnnnnnnnnnnnnnnnnnnnnnnnnnnnnnnnnnnnnnnnnnnnnnnnnnnnnnnnnnnnnnnnnnnnnnnnnnnnnnnnnnnnnnnnnnnnnnnnnnnnnnnnnnnnnnnnnnnnnnnnnnnnnnnnnnnnnnnnnnnnnnnnnnnnnnnnnnnnnnnnnnnnnnnnnnnnnnnnnnnnnnnnnnnnnnnnnnnnnnnnnnnnnnnnnnnnnnnnnnnnnnnnnnnnnnnnnnnnnnnnnnnnnnnnnnnnnnnnnnnnnnnnnnnnnnnnnnnnnnnnnnnnnnnnnnnnnnnnnnnnnnnnnnnnnnnnnnnnnnnnnnnnnnnnnnnnnnnnnnnnnnnnnnnnnnnnnnnnnnnnnnnnnnnnnnnnnnnnnnnnnnnnnnnnnnnnnnnnnnnnnnnnnnnnnnnnnnnnnnnnnnnnnnnnnnnnnnnnnnnnnnnnnnnnnnnnnnnnnnnnnnnnnnnnnnnnnnnnnnnnnnnnnnnnnnnnnnnnnnnnnnnnnnnnnnnnnnnnnnnnnnnnnnnnnnnnnnnnnnnnnnnnnnnnnnnnnnnnnnnnnnnnnnnnnnnnnnnnnnnnnnnnnnnnnnnnnnnnnnnnnnnnnnnnnnnnnnnnnnnnnnnnnnnnnnnnnnnnnnnnnnnnnnnnnnnnnnnnnnnnnnnnnnnnnnnnnnnnnnnnnnnnnnnnnnnnnnnnnnnnnnnnnnnnnnnnnnnnnnnnnnnnnnnnnnnnnnnnnnnnnnnnnnnnnnnnnnnnnnnnnnnnnnnnnnnnnnnnnnnnnnnnnnnnnnnnnnnnnnnnnnnnnnnnnnnnnnnnnnnnnnnnnnnnnnnnnnnnnnnnnnnnnnnnnnnnnnnnnnnnnnnnnnnnnnnnnnnnnnnnnnnnnnnnnnnnnnnnnnnnnnnnnnnnnnnnnnnnnnnnnnnnnnnnnnnnnnnnnnnnnnnnnnnnnnnnnnnnnnnnnnnnnnnnnnnnnnnnnnnnnnnnnnnnnnnnnnnnnnnnnnnnnnnnnnnnnnnnnnnnnnnnnnnnnnnnnnnnnnnnnnnnnnnnnnnnnnnnnnnnnnnnnnnnnnnnnnnnnnnnnnnnnnnnnnnnnnnnnnnnnnnnnnnnnnnnnnnnnnnnnnnnnnnnnnnnnnnnnnnnnnnnnnnnnnnnnnnnnnnnnnnnnnnnnnnnnnnnnnnnnnnnnnnnnnnnnnnnnnnnnnnnnnnnnnnnnnnnnnnnnnnnnnnnnnnnnnnnnnnnnnnnnnnnnnnnnnnnnnnnnnnnnnnnnnnnnnnnnnnnnnnnnnnnnnnnnnnnnnnnnnnnnnnnnnnnnnnnnnnnnnnnnnnnnnnnnnnnnnnnnnnnnnnnnnnnnnnnnnnnnnnnnnnnnnnnnnnnnnnnnnnnnnnnnnnnnnnnnnnnnnnnnnnnnnnnnnnnnnnnnnnnnnnnnnnnnnnnnnnnnnnnnnnnnnnnnnnnnnnnnnnnnnnnnnnnnnnnnnnnnnnnnnnnnnnnnnnnnnnnnnnnnnnnnnnnnnnnnnnnnnnnnnnnnnnnnnnnnnnnnnnnnnnnnnnnnnnnnnnnnnnnnnnnnnnnnnnnnnnnnnnnnnnnnnnnnnnnnnnnnnnnnnnnnnnnnnnnnnnnnnnnnnnnnnnnnnnnnnnnnnnnnnnnnnnnnnnnnnnnnnnnnnnnnnnnnnnnnnnnnnnnnnnnnnnnnnnnnnnnnnnnnnnnnnnnnnnnnnnnnnnnnnnnnnnnnnnnnnnnnnnnnnnnnnnnnnnnnnnnnnnnnnnnnnnnnnnnnnnnnnnnnnnnnnnnnnnnnnnnnnnnnnnnnnnnnnnnnnnnnnnnnnnnnnnnnnnnnnnnnnnnnnnnnnnnnnnnnnnnnnnnnnnnnnnnnnnnnnnnnnnnnnnnnnnnnnnnnnnnnnnnnnnnnnnnnnnnnnnnnnnnnnnnnnnnnnnnnnnnnnnnnnnnnnnnnnnnnnnnnnnnnnnnnnnnnnnnnnnnnnnnnnnnnnnnnnnnnnnnnnnnnnnnnnnnnnnnnnnnnnnnnnnnnnnnnnnnnnnnnnnnnnnnnnnnnnnnnnnnnnnnnnnnnnnnnnnnnnnnnnnnnnnnnnnnnnnnnnnnnnnnnnnnnnnnnnnnnnnnnnnnnnnnnnnnnnnnnnnnnnnnnnnnnnnnnnnnnnnnnnnnnnnnnnnnnnnnnnnnnnnnnnnnnnnnnnnnnnnnnnnnnnnnnnnnnnnnnnnnnnnnnnnnnnnnnnnnnnnnnnnnnnnnnnnnnnnnnnnnnnnnnnnnnnnnnnnnnnnnnnnnnnnnnnnnnnnnnnnnnnnnnnnnnnnnnnnnnnnnnnnnnnnnnnnnnnnnnnnnnnnnnnnnnnnnnnnnnnnnnnnnnnnnnnnnnnnnnnnnnnnnnnnnnnnnnnnnnnnnnnnnnnnnnnnnnnnnnnnnnnnnnnnnnnnnnnnnnnnnnnnnnnnnnnnnnnnnnnnnnnnnnnnnnnnnnnnnnnnnnnnnnnnnnnnnnnnnnnnnnnnnnnnnnnnnnnnnnnnnnnnnnnnnnnnnnnnnnnnnnnnnnnnnnnnnnnnnnnnnnnnnnnnnnnnnnnnnnnnnnnnnnnnnnnnnnnnnnnnnnnnnnnnnnnnnnnnnnnnnnnnnnnnnnnnnnnnnnnnnnnnnnnnnnnnnnnnnnnnnnnnnnnnnnnnnnnnnnnnnnnnnnnnnnnnnnnnnnnnnnnnnnnnnnnnnnnnnnnnnnnnnnnnnnnnnnnnnnnnnnnnnnnnnnnnnnnnnnnnnnnnnnnnnnnnnnnnnnnnnnnnnnnnnnnnnnnnnnnnnnnnnnnnnnnnnnnnnnnnnnnnnnnnnnnnnnnnnnnnnnnnnnnnnnnnnnnnnnnnnnnnnnnnnnnnnnnnnnnnnnnnnnnnnnnnnnnnnnnnnnnnnnnnnnnnnnnnnnnnnnnnnnnnnnnnnnnnnnnnnnnnnnnnnnnnnnnnnnnnnnnnnnnnnnnnnnnnnnnnnnnnnnnnnnnnnnnnnnnnnnnnnnnnnnnnnnnnnnnnnnnnnnnnnnnnnnnnnnnnnnnnnnnnnnnnnnnnnnnnnnnnnnnnnnnnnnnnnnnnnnnnnnnnnnnnnnnnnnnnnnnnnnnnnnnnnnnnnnnnnnnnnnnnnnnnnnnnnnnnnnnnnnnnnnnnnnnnnnnnnnnnnnnnnnnnnnnnnnnnnnnnnnnnnnnnnnnnnnnnnnnnnnnnnnnnnnnnnnnnnnnnnnnnnnnnnnnnnnnnnnnnnnnnnnnnnnnnnnnnnnnnnnnnnnnnnnnnnnnnnnnnnnnnnnnnnnnnnnnnnnnnnnnnnnnnnnnnnnnnnnnnnnnnnnnnnnnnnnnnnnnnnnnnnnnnnnnnnnnnnnnnnnnnnnnnnnnnnnnnnnnnnnnnnnnnnnnnnnnnnnnnnnnnnnnnnnnnnnnnnnnnnnnnnnnnnnnnnnnnnnnnnnnnnnnnnnnnnnnnnnnnnnnnnnnnnnnnnnnnnnnnnnnnnnnnnnnnnnnnnnnnnnnnnnnnnnnnnnnnnnnnnnnnnnnnnnnnnnnnnnnnnnnnnnnnnnnnnnnnnnnnnnnnnnnnnnnnnnnnnnnnnnnnnnnnnnnnnnnnnnnnnnnnnnnnnnnnnnnnnnnnnnnnnnnnnnnnnnnnnnnnnnnnnnnnnnnnnnnnnnnnnnnnnnnnnnnnnnnnnnnnnnnnnnnnnnnnnnnnnnnnnnnnnnnnnnnnnnnnnnnnnnnnnnnnnnnnnnnnnnnnnnnnnnnnnnnnnnnnnnnnnnnnnnnnnnnnnnnnnnnnnnnnnnnnnnnnnnnnnnnnnnnnnnnnnnnnnnnnnnnnnnnnnnnnnnnnnnnnnnnnnnnnnnnnnnnnnnnnnnnnnnnnnnnnnnnnnnnnnnnnnnnnnnnnnnnnnnnnnnnnnnnnnnnnnnnnnnnnnnnnnnnnnnnnnnnnnnnnnnnnnnnnnnnnnnnnnnnnnnnnnnnnnnnnnnnnnnnnnnnnnnnnnnnnnnnnnnnnnnnnnnnnnnnnnnnnnnnnnnnnnnnnnnnnnnnnnnnnnnnnnnnnnnnnnnnnnnnnnnnnnnnnnnnnnnnnnnnnnnnnnnnnnnnnnnnnnnnnnnnnnnnnnnnnnnnnnnnnnnnnnnnnnnnnnnnnnnnnnnnnnnnnnnnnnnnnnnnnnnnnnnnnnnnnnnnnnnnnnnnnnnnnnnnnnnnnnnnnnnnnnnnnnnnnnnnnnnnnnnnnnnnnnnnnnnnnnnnnnnnnnnnnnnnnnnnnnnnnnnnnnnnnnnnnnnnnnnnnnnnnnnnnnnnnnnnnnnnnnnnnnnnnnnnnnnnnnnnnnnnnnnnnnnnnnnnnnnnnnnnnnnnnnnnnnnnnnnnnnnnnnnnnnnnnnnnnnnnnnnnnnnnnnnnnnnnnnnnnnnnnnnnnnnnnnnnnnnnnnnnnnnnnnnnnnnnnnnnnnnnnnnnnnnnnnnnnnnnnnnnnnnnnnnnnnnnnnnnnnnnnnnnnnnnnnnnnnnnnnnnnnnnnnnnnnnnnnnnnnnnnnnnnnnnnnnnnnnnnnnnnnnnnnnnnnnnnnnnnnnnnnnnnnnnnnnnnnnnnnnnnnnnnnnnnnnnnnnnnnnnnnnnnnnnnnnnnnnnnnnnnnnnnnnnnnnnnnnnnnnnnnnnnnnnnnnnnnnnnnnnnnnnnnnnnnnnnnnnnnnnnnnnnnnnnnnnnnnnnnnnnnnnnnnnnnnnnnnnnnnnnnnnnnnnnnnnnnnnnnnnnnnnnnnnnnnnnnnnnnnnnnnnnnnnnnnnnnnnnnnnnnnnnnnnnnnnnnnnnnnnnnnnnnnnnnnnnnnnnnnnnnnnnnnnnnnnnnnnnnnnnnnnnnnnnnnnnnnnnnnnnnnnnnnnnnnnnnnnnnnnnnnnnnnnnnnnnnnnnnnnnnnnnnnnnnnnnnnnnnnnnnnnnnnnnnnnnnnnnnnnnnnnnnnnnnnnnnnnnnnnnnnnnnnnnnnnnnnnnnnnnnnnnnnnnnnnnnnnnnnnnnnnnnnnnnnnnnnnnnnnnnnnnnnnnnnnnnnnnnnnnnnnnnnnnnnnnnnnnnnnnnnnnnnnnnnnnnnnnnnnnnnnnnnnnnnnnnnnnnnnnnnnnnnnnnnnnnnnnnnnnnnnnnnnnnnnnnnnnnnnnnnnnnnnnnnnnnnnnnnnnnnnnnnnnnnnnnnnnnnnnnnnnnnnnnnnnnnnnnnnnnnnnnnnnnnnnnnnnnnnnnnnnnnnnnnnnnnnnnnnnnnnnnnnnnnnnnnnnnnnnnnnnnnnnnnnnnnnnnnnnnnnnnnnnnnnnnnnnnnnnnnnnnnnnnnnnnnnnnnnnnnnnnnnnnnnnnnnnnnnnnnnnnnnnnnnnnnnnnnnnnnnnnnnnnnnnnnnnnnnnnnnnnnnnnnnnnnnnnnnnnnnnnnnnnnnnnnnnnnnnnnnnnnnnnnnnnnnnnnnnnnnnnnnnnnnnnnnnnnnnnnnnnnnnnnnnnnnnnnnnnnnnnnnnnnnnnnnnnnnnnnnnnnnnnnnnnnnnnnnnnnnnnnnnnnnnnnnnnnnnnnnnnnnnnnnnnnnnnnnnnnnnnnnnnnnnnnnnnnnnnnnnnnnnnnnnnnnnnnnnnnnnnnnnnnnnnnnnnnnnnnnnnnnnnnnnnnnnnnnnnnnnnnnnnnnnnnnnnnnnnnnnnnnnnnnnnnnnnnnnnnnnnnnnnnnnnnnnnnnnnnnnnnnnnnnnnnnnnnnnnnnnnnnnnnnnnnnnnnnnnnnnnnnnnnnnnnnnnnnnnnnnnnnnnnnnnnnnnnnnnnnnnnnnnnnnnnnnnnnnnnnnnnnnnnnnnnnnnnnnnnnnnnnnnnnnnnnnnnnnnnnnnnnnnnnnnnnnnnnnnnnnnnnnnnnnnnnnnnnnnnnnnnnnnnnnnnnnnnnnnnnnnnnnnnnnnnnnnnnnnnnnnnnnnnnnnnnnnnnnnnnnnnnnnnnnnnnnnnnnnnnnnnnnnnnnnnnnnnnnnnnnnnnnnnnnnnnnnnnnnnnnnnnnnnnnnnnnnnnnnnnnnnnnnnnnnnnnnnnnnnnnnnnnnnnnnnnnnnnnnnnnnnnnnnnnnnnnnnnnnnnnnnnnnnnnnnnnnnnnnnnnnnnnnnnnnnnnnnnnnnnnnnnnnnnnnnnnnnnnnnnnnnnnnnnnnnnnnnnnnnnnnnnnnnnnnnnnnnnnnnnnnnnnnnnnnnnnnnnnnnnnnnnnnnnnnnnnnnnnnnnnnnnnnnnnnnnnnnnnnnnnnnnnnnnnnnnnnnnnnnnnnnnnnnnnnnnnnnnnnnnnnnnnnnnnnnnnnnnnnnnnnnnnnnnnnnnnnnnnnnnnnnnnnnnnnnnnnnnnnnnnnnnnnnnnnnnnnnnnnnnnnnnnnnnnnnnnnnnnnnnnnnnnnnnnnnnnnnnnnnnnnnnnnnnnnnnnnnnnnnnnnnnnnnnnnnnnnnnnnnnnnnnnnnnnnnnnnnnnnnnnnnnnnnnnnnnnnnnnnnnnnnnnnnnnnnnnnnnnnnnnnnnnnnnnnnnnnnnnnnnnnnnnnnnnnnnnnnnnnnnnnnnnnnnnnnnnnnnnnnnnnnnnnnnnnnnnnnnnnnnnnnnnnnnnnnnnnnnnnnnnnnnnnnnnnnnnnnnnnnnnnnnnnnnnnnnnnnnnnnnnnnnnnnnnnnnnnnnnnnnnnnnnnnnnnnnnnnnnnnnnnnnnnnnnnnnnnnnnnnnnnnnnnnnnnnnnnnnnnnnnnnnnnnnnnnnnnnnnnnnnnnnnnnnnnnnnnnnnnnnnnnnnnnnnnnnnnnnnnnnnnnnnnnnnnnnnnnnnnnnnnnnnnnnnnnnnnnnnnnnnnnnnnnnnnnnnnnnnnnnnnnnnnnnnnnnnnnnnnnnnnnnnnnnnnnnnnnnnnnnnnnnnnnnnnnnnnnnnnnnnnnnnnnnnnnnnnnnnnnnnnnnnnnnnnnnnnnnnnnnnnnnnnnnnnnnnnnnnnnnnnnnnnnnnnnnnnnnnnnnnnnnnnnnnnnnnnnnnnnnnnnnnnnnnnnnnnnnnnnnnnnnnnnnnnnnnnnnnnnnnnnnnnnnnnnnnnnnnnnnnnnnnnnnnnnnnnnnnnnnnnnnnnnnnnnnnnnnnnnnnnnnnnnnnnnnnnnnnnnnnnnnnnnnnnnnnnnnnnnnnnnnnnnnnnnnnnnnnnnnnnnnnnnnnnnnnnnnnnnnnnnnnnnnnnnnnnnnnnnnnnnnnnnnnnnnnnnnnnnnnnnnnnnnnnnnnnnnnnnnnnnnnnnnnnnnnnnnnnnnnnnnnnnnnnnnnnnnnnnnnnnnnnnnnnnnnnnnnnnnnnnnnnnnnnnnnnnnnnnnnnnnnnnnnnnnnnnnnnnnnnnnnnnnnnnnnnnnnnnnnnnnnnnnnnnnnnnnnnnnnnnnnnnnnnnnnnnnnnnnnnnnnnnnnnnnnnnnnnnnnnnnnnnnnnnnnnnnnnnnnnnnnnnnnnnnnnnnnnnnnnnnnnnnnnnnnnnnnnnnnnnnnnnnnnnnnnnnnnnnnnnnnnnnnnnnnnnnnnnnnnnnnnnnnnnnnnnnnnnnnnnnnnnnnnnnnnnnnnnnnnnnnnnnnnnnnnnnnnnnnnnnnnnnnnnnnnnnnnnnnnnnnnnnnnnnnnnnnnnnnnnnnnnnnnnnnnnnnnnnnnnnnnnnnnnnnnnnnnnnnnnnnnnnnnnnnnnnnnnnnnnnnnnnnnnnnnnnnnnnnnnnnnnnnnnnnnnnnnnnnnnnnnnnnnnnnnnnnnnnnnnnnnnnnnnnnnnnnnnnnnnnnnnnnnnnnnnnnnnnnnnnnnnnnnnnnnnnnnnnnnnnnnnnnnnnnnnnnnnnnnnnnnnnnnnnnnnnnnnnnnnnnnnnnnnnnnnnnnnnnnnnnnnnnnnnnnnnnnnnnnnnnnnnnnnnnnnnnnnnnnnnnnnnnnnnnnnnnnnnnnnnnnnnnnnnnnnnnnnnnnnnnnnnnnnnnnnnnnnnnnnnnnnnnnnnnnnnnnnnnnnnnnnnnnnnnnnnnnnnnnnnnnnnnnnnnnnnnnnnnnnnnnnnnnnnnnnnnnnnnnnnnnnnnnnnnnnnnnnnnnnnnnnnnnnnnnnnnnnnnnnnnnnnnnnnnnnnnnnnnnnnnnnnnnnnnnnnnnnnnnnnnnnnnnnnnnnnnnnnnnnnnnnnnnnnnnnnnnnnnnnnnnnnnnnnnnnnnnnnnnnnnnnnnnnnnnnnnnnnnnnnnnnnnnnnnnnnnnnnnnnnnnnnnnnnnnnnnnnnnnnnnnnnnnnnnnnnnnnnnnnnnnnnnnnnnnnnnnnnnnnnnnnnnnnnnnnnnnnnnnnnnnnnnnnnnnnnnnnnnnnnnnnnnnnnnnnnnnnnnnnnnnnnnnnnnnnnnnnnnnnnnnnnnnnnnnnnnnnnnnnnnnnnnnnnnnnnnnnnnnnnnnnnnnnnnnnnnnnnnnnnnnnnnnnnnnnnnnnnnnnnnnnnnnnnnnnnnnnnnnnnnnnnnnnnnnnnnnnnnnnnnnnnnnnnnnnnnnnnnnnnnnnnnnnnnnnnnnnnnnnnnnnnnnnnnnnnnnnnnnnnnnnnnnnnnnnnnnnnnnnnnnnnnnnnnnnnnnnnnnnnnnnnnnnnnnnnnnnnnnnnnnnnnnnnnnnnnnnnnnnnnnnnnnnnnnnnnnnnnnnnnnnnnnnnnnnnnnnnnnnnnnnnnnnnnnnnnnnnnnnnnnnnnnnnnnnnnnnnnnnnnnnnnnnnnnnnnnnnnnnnnnnnnnnnnnnnnnnnnnnnnnnnnnnnnnnnnnnnnnnnnnnnnnnnnnnnnnnnnnnnnnnnnnnnnnnnnnnnnnnnnnnnnnnnnnnnnnnnnnnnnnnnnnnnnnnnnnnnnnnnnnnnnnnnnnnnnnnnnnnnnnnnnnnnnnnnnnnnnnnnnnnnnnnnnnnnnnnnnnnnnnnnnnnnnnnnnnnnnnnnnnnnnnnnnnnnnnnnnnnnnnnnnnnnnnnnnnnnnnnnnnnnnnnnnnnnnnnnnnnnnnnnnnnnnnnnnnnnnnnnnnnnnnnnnnnnnnnnnnnnnnnnnnnnnnnnnnnnnnnnnnnnnnnnnnnnnnnnnnnnnnnnnnnnnnnnnnnnnnnnnnnnnnnnnnnnnnnnnnnnnnnnnnnnnnnnnnnnnnnnnnnnnnnnnnnnnnnnnnnnnnnnnnnnnnnnnnnnnnnnnnnnnnnnnnnnnnnnnnnnnnnnnnnnnnnnnnnnnnnnnnnnnnnnnnnnnnnnnnnnnnnnnnnnnnnnnnnnnnnnnnnnnnnnnnnnnnnnnnnnnnnnnnnnnnnnnnnnnnnnnnnnnnnnnnnnnnnnnnnnnnnnnnnnnnnnnnnnnnnnnnnnnnnnnnnnnnnnnnnnnnnnnnnnnnnnnnnnnnnnnnnnnnnnnnnnnnnnnnnnnnnnnnnnnnnnnnnnnnnnnnnnnnnnnnnnnnnnnnnnnnnnnnnnnnnnnnnnnnnnnnnnnnnnnnnnnnnnnnnnnnnnnnnnnnnnnnnnnnnnnnnnnnnnnnnnnnnnnnnnnnnnnnnnnnnnnnnnnnnnnnnnnnnnnnnnnnnnnnnnnnnnnnnnnnnnnnnnnnnnnnnnnnnnnnnnnnnnnnnnnnnnnnnnnnnnnnnnnnnnnnnnnnnnnnnnnnnnnnnnnnnnnnnnnnnnnnnnnnnnnnnnnnnnnnnnnnnnnnnnnnnnnnnnnnnnnnnnnnnnnnnnnnnnnnnnnnnnnnnnnnnnnnnnnnnnnnnnnnnnnnnnnnnnnnnnnnnnnnnnnnnnnnnnnnnnnnnnnnnnnnnnnnnnnnnnnnnnnnnnnnnnnnnnnnnnnnnnnnnnnnnnnnnnnnnnnnnnnnnnnnnnnnnnnnnnnnnnnnnnnnnnnnnnnnnnnnnnnnnnnnnnnnnnnnnnnnnnnnnnnnnnnnnnnnnnnnnnnnnnnnnnnnnnnnnnnnnnnnnnnnnnnnnnnnnnnnnnnnnnnnnnnnnnnnnnnnnnnnnnnnnnnnnnnnnnnnnnnnnnnnnnnnnnnnnnnnnnnnnnnnnnnnnnnnnnnnnnnnnnnnnnnnnnnnnnnnnnnnnnnnnnnnnnnnnnnnnnnnnnnnnnnnnnnnnnnnnnnnnnnnnnnnnnnnnnnnnnnnnnnnnnnnnnnnnnnnnnnnnnnnnnnnnnnnnnnnnnnnnnnnnnnnnnnnnnnnnnnnnnnnnnnnnnnnnnnnnnnnnnnnnnnnnnnnnnnnnnnnnnnnnnnnnnnnnnnnnnnnnnnnnnnnnnnnnnnnnnnnnnnnnnnnnnnnnnnnnnnnnnnnnnnnnnnnnnnnnnnnnnnnnnnnnnnnnnnnnnnnnnnnnnnnnnnnnnnnnnnnnnnnnnnnnnnnnnnnnnnnnnnnnnnnnnnnnnnnnnnnnnnnnnnnnnnnnnnnnnnnnnnnnnnnnnnnnnnnnnnnnnnnnnnnnnnnnnnnnnnnnnnnnnnnnnnnnnnnnnnnnnnnnnnnnnnnnnnnnnnnnnnnnnnnnnnnnnnnnnnnnnnnnnnnnnnnnnnnnnnnnnnnnnnnnnnnnnnnnnnnnnnnnnnnnnnnnnnnnnnnnnnnnnnnnnnnnnnnnnnnnnnnnnnnnnnnnnnnnnnnnnnnnnnnnnnnnnnnnnnnnnnnnnnnnnnnnnnnnnnnnnnnnnnnnnnnnnnnnnnnnnnnnnnnnnnnnnnnnnnnnnnnnnnnnnnnnnnnnnnnnnnnnnnnnnnnnnnnnnnnnnnnnnnnnnnnnnnnnnnnnnnnnnnnnnnnnnnnnnnnnnnnnnnnnnnnnnnnnnnnnnnnnnnnnnnnnnnnnnnnnnnnnnnnnnnnnnnnnnnnnnnnnnnnnnnnnnnnnnnnnnnnnnnnnnnnnnnnnnnnnnnnnnnnnnnnnnnnnnnnnnnnnnnnnnnnnnnnnnnnnnnnnnnnnnnnnnnnnnnnnnnnnnnnnnnnnnnnnnnnnnnnnnnnnnnnnnnnnnnnnnnnnnnnnnnnnnnnnnnnnnnnnnnnnnnnnnnnnnnnnnnnnnnnnnnnnnnnnnnnnnnnnnnnnnnnnnnnnnnnnnnnnnnnnnnnnnnnnnnnnnnnnnnnnnnnnnnnnnnnnnnnnnnnnnnnnnnnnnnnnnnnnnnnnnnnnnnnnnnnnnnnnnnnnnnnnnnnnnnnnnnnnnnnnnnnnnnnnnnnnnnnnnnnnnnnnnnnnnnnnnnnnnnnnnnnnnnnnnnnnnnnnnnnnnnnnnnnnnnnnnnnnnnnnnnnnnnnnnnnnnnnnnnnnnnnnnnnnnnnnnnnnnnnnnnnnnnnnnnnnnnnnnnnnnnnnnnnnnnnnnnnnnnnnnnnnnnnnnnnnnnnnnnnnnnnnnnnnnnnnnnnnnnnnnnnnnnnnnnnnnnnnnnnnnnnnnnnnnnnnnnnnnnnnnnnnnnnnnnnnnnnnnnnnnnnnnnnnnnnnnnnnnnnnnnnnnnnnnnnnnnnnnnnnnnnnnnnnnnnnnnnnnnnnnnnnnnnnnnnnnnnnnnnnnnnnnnnnnnnnnnnnnnnnnnnnnnnnnnnnnnnnnnnnnnnnnnnnnnnnnnnnnnnnnnnnnnnnnnnnnnnnnnnnnnnnnnnnnnnnnnnnnnnnnnnnnnnnnnnnnnnnnnnnnnnnnnnnnnnnnnnnnnnnnnnnnnnnnnnnnnnnnnnnnnnnnnnnnnnnnnnnnnnnnnnnnnnnnnnnnnnnnnnnnnnnnnnnnnnnnnnnnnnnnnnnnnnnnnnnnnnnnnnnnnnnnnnnnnnnnnnnnnnnnnnnnnnnnnnnnnnnnnnnnnnnnnnnnnnnnnnnnnnnnnnnnnnnnnnnnnnnnnnnnnnnnnnnnnnnnnnnnnnnnnnnnnnnnnnnnnnnnnnnnnnnnnnnnnnnnnnnnnnnnnnnnnnnnnnnnnnnnnnnnnnnnnnnnnnnnnnnnnnnnnnnnnnnnnnnnnnnnnnnnnnnnnnnnnnnnnnnnnnnnnnnnnnnnnnnnnnnnnnnnnnnnnnnnnnnnnnnnnnnnnnnnnnnnnnnnnnnnnnnnnnnnnnnnnnnnnnnnnnnnnnnnnnnnnnnnnnnnnnnnnnnnnnnnnnnnnnnnnnnnnnnnnnnnnnnnnnnnnnnnnnnnnnnnnnnnnnnnnnnnnnnnnnnnnnnnnnnnnnnnnnnnnnnnnnnnnnnnnnnnnnnnnnnnnnnnnnnnnnnnnnnnnnnnnnnnnnnnnnnnnnnnnnnnnnnnnnnnnnnnnnnnnnnnnnnnnnnnnnnnnnnnnnnnnnnnnnnnnnnnnnnnnnnnnnnnnnnnnnnnnnnnnnnnnnnnnnnnnnnnnnnnnnnnnnnnnnnnnnnnnnnnnnnnnnnnnnnnnnnnnnnnnnnnnnnnnnnnnnnnnnnnnnnnnnnnnnnnnnnnnnnnnnnnnnnnnnnnnnnnnnnnnnnnnnnnnnnnnnnnnnnnnnnnnnnnnnnnnnnnnnnnnnnnnnnnnnnnnnnnnnnnnnnnnnnnnnnnnnnnnnnnnnnnnnnnnnnnnnnnnnnnnnnnnnnnnnnnnnnnnnnnnnnnnnnnnnnnnnnnnnnnnnnnnnnnnnnnnnnnnnnnnnnnnnnnnnnnnnnnnnnnnnnnnnnnnnnnnnnnnnnnnnnnnnnnnnnnnnnnnnnnnnnnnnnnnnnnnnnnnnnnnnnnnnnnnnnnnnnnnnnnnnnnnnnnnnnnnnnnnnnnnnnnnnnnnnnnnnnnnnnnnnnnnnnnnnnnnnnnnnnnnnnnnnnnnnnnnnnnnnnnnnnnnnnnnnnnnnnnnnnnnnnnnnnnnnnnnnnnnnnnnnnnnnnnnnnnnnnnnnnnnnnnnnnnnnnnnnnnnnnnnnnnnnnnnnnnnnnnnnnnnnnnnnnnnnnnnnnnnnnnnnnnnnnnnnnnnnnnnnnnnnnnnnnnnnnnnnnnnnnnnnnnnnnnnnnnnnnnnnnnnnnnnnnnnnnnnnnnnnnnnnnnnnnnnnnnnnnnnnnnnnnnnnnnnnnnnnnnnnnnnnnnnnnnnnnnnnnnnnnnnnnnnnnnnnnnnnnnnnnnnnnnnnnnnnnnnnnnnnnnnnnnnnnnnnnnnnnnnnnnnnnnnnnnnnnnnnnnnnnnnnnnnnnnnnnnnnnnnnnnnnnnnnnnnnnnnnnnnnnnnnnnnnnnnnnnnnnnnnnnnnnnnnnnnnnnnnnnnnnnnnnnnnnnnnnnnnnnnnnnnnnnnnnnnnnnnnnnnnnnnnnnnnnnnnnnnnnnnnnnnnnnnnnnnnnnnnnnnnnnnnnnnnnnnnnnnnnnnnnnnnnnnnnnnnnnnnnnnnnnnnnnnnnnnnnnnnnnnnnnnnnnnnnnnnnnnnnnnnnnnnnnnnnnnnnnnnnnnnnnnnnnnnnnnnnnnnnnnnnnnnnnnnnnnnnnnnnnnnnnnnnnnnnnnnnnnnnnnnnnnnnnnnnnnnnnnnnnnnnnnnnnnnnnnnnnnnnnnnnnnnnnnnnnnnnnnnnnnnnnnnnnnnnnnnnnnnnnnnnnnnnnnnnnnnnnnnnnnnnnnnnnnnnnnnnnnnnnnnnnnnnnnnnnnnnnnnnnnnnnnnnnnnnnnnnnnnnnnnnnnnnnnnnnnnnnnnnnnnnnnnnnnnnnnnnnnnnnnnnnnnnnnnnnnnnnnnnnnnnnnnnnnnnnnnnnnnnnnnnnnnnnnnnnnnnnnnnnnnnnnnnnnnnnnnnnnnnnnnnnnnnnnnnnnnnnnnnnnnnnnnnnnnnnnnnnnnnnnnnnnnnnnnnnnnnnnnnnnnnnnnnnnnnnnnnnnnnnnnnnnnnnnnnnnnnnnnnnnnnnnnnnnnnnnnnnnnnnnnnnnnnnnnnnnnnnnnnnnnnnnnnnnnnnnnnnnnnnnnnnnnnnnnnnnnnnnnnnnnnnnnnnnnnnnnnnnnnnnnnnnnnnnnnnnnnnnnnnnnnnnnnnnnnnnnnnnnnnnnnnnnnnnnnnnnnnnnnnnnnnnnnnnnnnnnnnnnnnnnnnnnnnnnnnnnnnnnnnnnnnnnnnnnnnnnnnnnnnnnnnnnnnnnnnnnnnnnnnnnnnnnnnnnnnnnnnnnnnnnnnnnnnnnnnnnnnnnnnnnnnnnnnnnnnnnnnnnnnnnnnnnnnnnnnnnnnnnnnnnnnnnnnnnnnnnnnnnnnnnnnnnnnnnnnnnnnnnnnnnnnnnnnnnnnnnnnnnnnnnnnnnnnnnnnnnnnnnnnnnnnnnnnnnnnnnnnnnnnnnnnnnnnnnnnnnnnnnnnnnnnnnnnnnnnnnnnnnnnnnnnnnnnnnnnnnnnnnnnnnnnnnnnnnnnnnnnnnnnnnnnnnnnnnnnnnnnnnnnnnnnnnnnnnnnnnnnnnnnnnnnnnnnnnnnnnnnnnnnnnnnnnnnnnnnnnnnnnnnnnnnnnnnnnnnnnnnnnnnnnnnnnnnnnnnnnnnnnnnnnnnnnnnnnnnnnnnnnnnnnnnnnnnnnnnnnnnnnnnnnnnnnnnnnnnnnnnnnnnnnnnnnnnnnnnnnnnnnnnnnnnnnnnnnnnnnnnnnnnnnnnnnnnnnnnnnnnnnnnnnnnnnnnnnnnnnnnnnnnnnnnnnnnnnnnnnnnnnnnnnnnnnnnnnnnnnnnnnnnnnnnnnnnnnnnnnnnnnnnnnnnnnnnnnnnnnnnnnnnnnnnnnnnnnnnnnnnnnnnnnnnnnnnnnnnnnnnnnnnnnnnnnnnnnnnnnnnnnnnnnnnnnnnnnnnnnnnnnnnnnnnnnnnnnnnnnnnnnnnnnnnnnnnnnnnnnnnnnnnnnnnnnnnnnnnnnnnnnnnnnnnnnnnnnnnnnnnnnnnnnnnnnnnnnnnnnnnnnnnnnnnnnnnnnnnnnnnnnnnnnnnnnnnnnnnnnnnnnnnnnnnnnnnnnnnnnnnnnnnnnnnnnnnnnnnnnnnnnnnnnnnnnnnnnnnnnnnnnnnnnnnnnnnnnnnnnnnnnnnnnnnnnnnnnnnnnnnnnnnnnnnnnnnnnnnnnnnnnnnnnnnnnnnnnnnnnnnnnnnnnnnnnnnnnnnnnnnnnnnnnnnnnnnnnnnnnnnnnnnnnnnnnnnnnnnnnnnnnnnnnnnnnnnnnnnnnnnnnnnnnnnnnnnnnnnnnnnnnnnnnnnnnnnnnnnnnnnnnnnnnnnnnnnnnnnnnnnnnnnnnnnnnnnnnnnnnnnnnnnnnnnnnnnnnnnnnnnnnnnnnnnnnnnnnnnnnnnnnnnnnnnnnnnnnnnnnnnnnnnnnnnnnnnnnnnnnnnnnnnnnnnnnnnnnnnnnnnnnnnnnnnnnnnnnnnnnnnnnnnnnnnnnnnnnnnnnnnnnnnnnnnnnnnnnnnnnnnnnnnnnnnnnnnnnnnnnnnnnnnnnnnnnnnnnnnnnnnnnnnnnnnnnnnnnnnnnnnnnnnnnnnnnnnnnnnnnnnnnnnnnnnnnnnnnnnnnnnnnnnnnnnnnnnnnnnnnnnnnnnnnnnnnnnnnnnnnnnnnnnnnnnnnnnnnnnnnnnnnnnnnnnnnnnnnnnnnnnnnnnnnnnnnnnnnnnnnnnnnnnnnnnnnnnnnnnnnnnnnnnnnnnnnnnnnnnnnnnnnnnnnnnnnnnnnnnnnnnnnnnnnnnnnnnnnnnnnnnnnnnnnnnnnnnnnnnnnnnnnnnnnnnnnnnnnnnnnnnnnnnnnnnnnnnnnnnnnnnnnnnnnnnnnnnnnnnnnnnnnnnnnnnnnnnnnnnnnnnnnnnnnnnnnnnnnnnnnnnnnnnnnnnnnnnnnnnnnnnnnnnnnnnnnnnnnnnnnnnnnnnnnnnnnnnnnnnnnnnnnnnnnnnnnnnnnnnnnnnnnnnnnnnnnnnnnnnnnnnnnnnnnnnnnnnnnnnnnnnnnnnnnnnnnnnnnnnnnnnnnnnnnnnnnnnnnnnnnnnnnnnnnnnnnnnnnnnnnnnnnnnnnnnnnnnnnnnnnnnnnnnnnnnnnnnnnnnnnnnnnnnnnnnnnnnnnnnnnnnnnnnnnnnnnnnnnnnnnnnnnnnnnnnnnnnnnnnnnnnnnnnnnnnnnnnnnnnnnnnnnnnnnnnnnnnnnnnnnnnnnnnnnnnnnnnnnnnnnnnnnnnnnnnnnnnnnnnnnnnnnnnnnnnnnnnnnnnnnnnnnnnnnnnnnnnnnnnnnnnnnnnnnnnnnnnnnnnnnnnnnnnnnnnnnnnnnnnnnnnnnnnnnnnnnnnnnnnnnnnnnnnnnnnnnnnnnnnnnnnnnnnnnnnnnnnnnnnnnnnnnnnnnnnnnnnnnnnnnnnnnnnnnnnnnnnnnnnnnnnnnnnnnnnnnnnnnnnnnnnnnnnnnnnnnnnnnnnnnnnnnnnnnnnnnnnnnnnnnnnnnnnnnnnnnnnnnnnnnnnnnnnnnnnnnnnnnnnnnnnnnnnnnnnnnnnnnnnnnnnnnnnnnnnnnnnnnnnnnnnnnnnnnnnnnnnnnnnnnnnnnnnnnnnnnnnnnnnnnnnnnnnnnnnnnnnnnnnnnnnnnnnnnnnnnnnnnnnnnnnnnnnnnnnnnnnnnnnnnnnnnnnnnnnnnnnnnnnnnnnnnnnnnnnnnnnnnnnnnnnnnnnnnnnnnnnnnnnnnnnnnnnnnnnnnnnnnnnnnnnnnnnnnnnnnnnnnnnnnnnnnnnnnnnnnnnnnnnnnnnnnnnnnnnnnnnnnnnnnnnnnnnnnnnnnnnnnnnnnnnnnnnnnnnnnnnnnnnnnnnnnnnnnnnnnnnnnnnnnnnnnnnnnnnnnnnnnnnnnnnnnnnnnnnnnnnnnnnnnnnnnnnnnnnnnnnnnnnnnnnnnnnnnnnnnnnnnnnnnnnnnnnnnnnnnnnnnnnnnnnnnnnnnnnnnnnnnnnnnnnnnnnnnnnnnnnnnnnnnnnnnnnnnnnnnnnnnnnnnnnnnnnnnnnnnnnnnnnnnnnnnnnnnnnnnnnnnnnnnnnnnnnnnnnnnnnnnnnnnnnnnnnnnnnnnnnnnnnnnnnnnnnnnnnnnnnnnnnnnnnnnnnnnnnnnnnnnnnnnnnnnnnnnnnnnnnnnnnnnnnnnnnnnnnnnnnnnnnnnnnnnnnnnnnnnnnnnnnnnnnnnnnnnnnnnnnnnnnnnnnnnnnnnnnnnnnnnnnnnnnnnnnnnnnnnnnnnnnnnnnnnnnnnnnnnnnnnnnnnnnnnnnnnnnnnnnnnnnnnnnnnnnnnnnnnnnnnnnnnnnnnnnnnnnnnnnnnnnnnnnnnnnnnnnnnnnnnnnnnnnnnnnnnnnnnnnnnnnnnnnnnnnnnnnnnnnnnnnnnnnnnnnnnnnnnnnnnnnnnnnnnnnnnnnnnnnnnnnnnnnnnnnnnnnnnnnnnnnnnnnnnnnnnnnnnnnnnnnnnnnnnnnnnnnnnnnnnnnnnnnnnnnnnnnnnnnnnnnnnnnnnnnnnnnnnnnnnnnnnnnnnnnnnnnnnnnnnnnnnnnnnnnnnnnnnnnnnnnnnnnnnnnnnnnnnnnnnnnnnnnnnnnnnnnnnnnnnnnnnnnnnnnnnnnnnnnnnnnnnnnnnnnnnnnnnnnnnnnnnnnnnnnnnnnnnnnnnnnnnnnnnnnnnnnnnnnnnnnnnnnnnnnnnnnnnnnnnnnnnnnnnnnnnnnnnnnnnnnnnnnnnnnnnnnnnnnnnnnnnnnnnnnnnnnnnnnnnnnnnnnnnnnnnnnnnnnnnnnnnnnnnnnnnnnnnnnnnnnnnnnnnnnnnnnnnnnnnnnnnnnnnnnnnnnnnnnnnnnnnnnnnnnnnnnnnnnnnnnnnnnnnnnnnnnnnnnnnnnnnnnnnnnnnnnnnnnnnnnnnnnnnnnnnnnnnnnnnnnnnnnnnnnnnnnnnnnnnnnnnnnnnnnnnnnnnnnnnnnnnnnnnnnnnnnnnnnnnnnnnnnnnnnnnnnnnnnnnnnnnnnnnnnnnnnnnnnnnnnnnnnnnnnnnnnnnnnnnnnnnnnnnnnnnnnnnnnnnnnnnnnnnnnnnnnnnnnnnnnnnnnnnnnnnnnnnnnnnnnnnnnnnnnnnnnnnnnnnnnnnnnnnnnnnnnnnnnnnnnnnnnnnnnnnnnnnnnnnnnnnnnnnnnnnnnnnnnnnnnnnnnnnnnnnnnnnnnnnnnnnnnnnnnnnnnnnnnnnnnnnnnnnnnnnnnnnnnnnnnnnnnnnnnnnnnnnnnnnnnnnnnnnnnnnnnnnnnnnnnnnnnnnnnnnnnnnnnnnnnnnnnnnnnnnnnnnnnnnnnnnnnnnnnnnnnnnnnnnnnnnnnnnnnnnnnnnnnnnnnnnnnnnnnnnnnnnnnnnnnnnnnnnnnnnnnnnnnnnnnnnnnnnnnnnnnnnnnnnnnnnnnnnnnnnnnnnnnnnnnnnnnnnnnnnnnnnnnnnnnnnnnnnnnnnnnnnnnnnnnnnnnnnnnnnnnnnnnnnnnnnnnnnnnnnnnnnnnnnnnnnnnnnnnnnnnnnnnnnnnnnnnnnnnnnnnnnnnnnnnnnnnnnnnnnnnnnnnnnnnnnnnnnnnnnnnnnnnnnnnnnnnnnnnnnnnnnnnnnnnnnnnnnnnnnnnnnnnnnnnnnnnnnnnnnnnnnnnnnnnnnnnnnnnnnnnnnnnnnnnnnnnnnnnnnnnnnnnnnnnnnnnnnnnnnnnnnnnnnnnnnnnnnnnnnnnnnnnnnnnnnnnnnnnnnnnnnnnnnnnnnnnnnnnnnnnnnnnnnnnnnnnnnnnnnnnnnnnnnnnnnnnnnnnnnnnnnnnnnnnnnnnnnnnnnnnnnnnnnnnnnnnnnnnnnnnnnnnnnnnnnnnnnnnnnnnnnnnnnnnnnnnnnnnnnnnnnnnnnnnnnnnnnnnnnnnnnnnnnnnnnnnnnnnnnnnnnnnnnnnnnnnnnnnnnnnnnnnnnnnnnnnnnnnnnnnnnnnnnnnnnnnnnnnnnnnnnnnnnnnnnnnnnnnnnnnnnnnnnnnnnnnnnnnnnnnnnnnnnnnnnnnnnnnnnnnnnnnnnnnnnnnnnnnnnnnnnnnnnnnnnnnnnnnnnnnnnnnnnnnnnnnnnnnnnnnnnnnnnnnnnnnnnnnnnnnnnnnnnnnnnnnnnnnnnnnnnnnnnnnnnnnnnnnnnnnnnnnnnnnnnnnnnnnnnnnnnnnnnnnnnnnnnnnnnnnnnnnnnnnnnnnnnnnnnnnnnnnnnnnnnnnnnnnnnnnnnnnnnnnnnnnnnnnnnnnnnnnnnnnnnnnnnnnnnnnnnnnnnnnnnnnnnnnnnnnnnnnnnnnnnnnnnnnnnnnnnnnnnnnnnnnnnnnnnnnnnnnnnnnnnnnnnnnnnnnnnnnnnnnnnnnnnnnnnnnnnnnnnnnnnnnnnnnnnnnnnnnnnnnnnnnnnnnnnnnnnnnnnnnnnnnnnnnnnnnnnnnnnnnnnnnnnnnnnnnnnnnnnnnnnnnnnnnnnnnnnnnnnnnnnnnnnnnnnnnnnnnnnnnnnnnnnnnnnnnnnnnnnnnnnnnnnnnnnnnnnnnnnnnnnnnnnnnnnnnnnnnnnnnnnnnnnnnnnnnnnnnnnnnnnnnnnnnnnnnnnnnnnnnnnnnnnnnnnnnnnnnnnnnnnnnnnnnnnnnnnnnnnnnnnnnnnnnnnnnnnnnnnnnnnnnnnnnnnnnnnnnnnnnnnnnnnnnnnnnnnnnnnnnnnnnnnnnnnnnnnnnnnnnnnnnnnnnnnnnnnnnnnnnnnnnnnnnnnnnnnnnnnnnnnnnnnnnnnnnnnnnnnnnnnnnnnnnnnnnnnnnnnnnnnnnnnnnnnnnnnnnnnnnnnnnnnnnnnnnnnnnnnnnnnnnnnnnnnnnnnnnnnnnnnnnnnnnnnnnnnnnnnnnnnnnnnnnnnnnnnnnnnnnnnnnnnnnnnnnnnnnnnnnnnnnnnnnnnnnnnnnnnnnnnnnnnnnnnnnnnnnnnnnnnnnnnnnnnnnnnnnnnnnnnnnnnnnnnnnnnnnnnnnnnnnnnnnnnnnnnnnnnnnnnnnnnnnnnnnnnnnnnnnnnnnnnnnnnnnnnnnnnnnnnnnnnnnnnnnnnnnnnnnnnnnnnnnnnnnnnnnnnnnnnnnnnnnnnnnnnnnnnnnnnnnnnnnnnnnnnnnnnnnnnnnnnnnnnnnnnnnnnnnnnnnnnnnnnnnnnnnnnnnnnnnnnnnnnnnnnnnnnnnnnnnnnnnnnnnnnnnnnnnnnnnnnnnnnnnnnnnnnnnnnnnnnnnnnnnnnnnnnnnnnnnnnnnnnnnnnnnnnnnnnnnnnnnnnnnnnnnnnnnnnnnnnnnnnnnnnnnnnnnnnnnnnnnnnnnnnnnnnnnnnnnnnnnnnnnnnnnnnnnnnnnnnnnnnnnnnnnnnnnnnnnnnnnnnnnnnnnnnnnnnnnnnnnnnnnnnnnnnnnnnnnnnnnnnnnnnnnnnnnnnnnnnnnnnnnnnnnnnnnnnnnnnnnnnnnnnnnnnnnnnnnnnnnnnnnnnnnnnnnnnnnnnnnnnnnnnnnnnnnnnnnnnnnnnnnnnnnnnnnnnnnnnnnnnnnnnnnnnnnnnnnnnnnnnnnnnnnnnnnnnnnnnnnnnnnnnnnnnnnnnnnnnnnnnnnnnnnnnnnnnnnnnnnnnnnnnnnnnnnnnnnnnnnnnnnnnnnnnnnnnnnnnnnnnnnnnnnnnnnnnnnnnnnnnnnnnnnnnnnnnnnnnnnnnnnnnnnnnnnnnnnnnnnnnnnnnnnnnnnnnnnnnnnnnnnnnnnnnnnnnnnnnnnnnnnnnnnnnnnnnnnnnnnnnnnnnnnnnnnnnnnnnnnnnnnnnnnnnnnnnnnnnnnnnnnnnnnnnnnnnnnnnnnnnnnnnnnnnnnnnnnnnnnnnnnnnnnnnnnnnnnnnnnnnnnnnnnnnnnnnnnnnnnnnnnnnnnnnnnnnnnnnnnnnnnnnnnnnnnnnnnnnnnnnnnnnnnnnnnnnnnnnnnnnnnnnnnnnnnnnnnnnnnnnnnnnnnnnnnnnnnnnnnnnnnnnnnnnnnnnnnnnnnnnnnnnnnnnnnnnnnnnnnnnnnnnnnnnnnnnnnnnnnnnnnnnnnnnnnnnnnnnnnnnnnnnnnnnnnnnnnnnnnnnnnnnnnnnnnnnnnnnnnnnnnnnnnnnnnnnnnnnnnnnnnnnnnnnnnnnnnnnnnnnnnnnnnnnnnnnnnnnnnnnnnnnnnnnnnnnnnnnnnnnnnnnnnnnnnnnnnnnnnnnnnnnnnnnnnnnnnnnnnnnnnnnnnnnnnnnnnnnnnnnnnnnnnnnnnnnnnnnnnnnnnnnnnnnnnnnnnnnnnnnnnnnnnnnnnnnnnnnnnnnnnnnnnnnnnnnnnnnnnnnnnnnnnnnnnnnnnnnnnnnnnnnnnnnnnnnnnnnnnnnnnnnnnnnnnnnnnnnnnnnnnnnnnnnnnnnnnnnnnnnnnnnnnnnnnnnnnnnnnnnnnnnnnnnnnnnnnnnnnnnnnnnnnnnnnnnnnnnnnnnnnnnnnnnnnnnnnnnnnnnnnnnnnnnnnnnnnnnnnnnnnnnnnnnnnnnnnnnnnnnnnnnnnnnnnnnnnnnnnnnnnnnnnnnnnnnnnnnnnnnnnnnnnnnnnnnnnnnnnnnnnnnnnnnnnnnnnnnnnnnnnnnnnnnnnnnnnnnnnnnnnnnnnnnnnnnnnnnnnnnnnnnnnnnnnnnnnnnnnnnnnnnnnnnnnnnnnnnnnnnnnnnnnnnnnnnnnnnnnnnnnnnnnnnnnnnnnnnnnnnnnnnnnnnnnnnnnnnnnnnnnnnnnnnnnnnnnnnnnnnnnnnnnnnnnnnnnnnnnnnnnnnnnnnnnnnnnnnnnnnnnnnnnnnnnnnnnnnnnnnnnnnnnnnnnnnnnnnnnnnnnnnnnnnnnnnnnnnnnnnnnnnnnnnnnnnnnnnnnnnnnnnnnnnnnnnnnnnnnnnnnnnnnnnnnnnnnnnnnnnnnnnnnnnnnnnnnnnnnnnnnnnnnnnnnnnnnnnnnnnnnnnnnnnnnnnnnnnnnnnnnnnnnnnnnnnnnnnnnnnnnnnnnnnnnnnnnnnnnnnnnnnnnnnnnnnnnnnnnnnnnnnnnnnnnnnnnnnnnnnnnnnnnnnnnnnnnnnnnnnnnnnnnnnnnnnnnnnnnnnnnnnnnnnnnnnnnnnnnnnnnnnnnnnnnnnnnnnnnnnnnnnnnnnnnnnnnnnnnnnnnnnnnnnnnnnnnnnnnnnnnnnnnnnnnnnnnnnnnnnnnnnnnnnnnnnnnnnnnnnnnnnnnnnnnnnnnnnnnnnnnnnnnnnnnnnnnnnnnnnnnnnnnnnnnnnnnnnnnnnnnnnnnnnnnnnnnnnnnnnnnnnnnnnnnnnnnnnnnnnnnnnnnnnnnnnnnnnnnnnnnnnnnnnnnnnnnnnnnnnnnnnnnnnnnnnnnnnnnnnnnnnnnnnnnnnnnnnnnnnnnnnnnnnnnnnnnnnnnnnnnnnnnnnnnnnnnnnnnnnnnnnnnnnnnnnnnnnnnnnnnnnnnnnnnnnnnnnnnnnnnnnnnnnnnnnnnnnnnnnnnnnnnnnnnnnnnnnnnnnnnnnnnnnnnnnnnnnnnnnnnnnnnnnnnnnnnnnnnnnnnnnnnnnnnnnnnnnnnnnnnnnnnnnnnnnnnnnnnnnnnnnnnnnnnnnnnnnnnnnnnnnnnnnnnnnnnnnnnnnnnnnnnnnnnnnnnnnnnnnnnnnnnnnnnnnnnnnnnnnnnnnnnnnnnnnnnnnnnnnnnnnnnnnnnnnnnnnnnnnnnnnnnnnnnnnnnnnnnnnnnnnnnnnnnnnnnnnnnnnnnnnnnnnnnnnnnnnnnnnnnnnnnnnnnnnnnnnnnnnnnnnnnnnnnnnnnnnnnnnnnnnnnnnnnnnnnnnnnnnnnnnnnnnnnnnnnnnnnnnnnnnnnnnnnnnnnnnnnnnnnnnnnnnnnnnnnnnnnnnnnnnnnnnnnnnnnnnnnnnnnnnnnnnnnnnnnnnnnnnnnnnnnnnnnnnnnnnnnnnnnnnnnnnnnnnnnnnnnnnnnnnnnnnnnnnnnnnnnnnnnnnnnnnnnnnnnnnnnnnnnnnnnnnnnnnnnnnnnnnnnnnnnnnnnnnnnnnnnnnnnnnnnnnnnnnnnnnnnnnnnnnnnnnnnnnnnnnnnnnnnnnnnnnnnnnnnnnnnnnnnnnnnnnnnnnnnnnnnnnnnnnnnnnnnnnnnnnnnnnnnnnnnnnnnnnnnnnnnnnnnnnnnnnnnnnnnnnnnnnnnnnnnnnnnnnnnnnnnnnnnnnnnnnnnnnnnnnnnnnnnnnnnnnnnnnnnnnnnnnnnnnnnnnnnnnnnnnnnnnnnnnnnnnnnnnnnnnnnnnnnnnnnnnnnnnnnnnnnnnnnnnnnnnnnnnnnnnnnnnnnnnnnnnnnnnnnnnnnnnnnnnnnnnnnnnnnnnnnnnnnnnnnnnnnnnnnnnnnnnnnnnnnnnnnnnnnnnnnnnnnnnnnnnnnnnnnnnnnnnnnnnnnnnnnnnnnnnnnnnnnnnnnnnnnnnnnnnnnnnnnnnnnnnnnnnnnnnnnnnnnnnnnnnnnnnnnnnnnnnnnnnnnnnnnnnnnnnnnnnnnnnnnnnnnnnnnnnnnnnnnnnnnnnnnnnnnnnnnnnnnnnnnnnnnnnnnnnnnnnnnnnnnnnnnnnnnnnnnnnnnnnnnnnnnnnnnnnnnnnnnnnnnnnnnnnnnnnnnnnnnnnnnnnnnnnnnnnnnnnnnnnnnnnnnnnnnnnnnnnnnnnnnnnnnnnnnnnnnnnnnnnnnnnnnnnnnnnnnnnnnnnnnnnnnnnnnnnnnnnnnnnnnnnnnnnnnnnnnnnnnnnnnnnnnnnnnnnnnnnnnnnnnnnnnnnnnnnnnnnnnnnnnnnnnnnnnnnnnnnnnnnnnnnnnnnnnnnnnnnnnnnnnnnnnnnnnnnnnnnnnnnnnnnnnnnnnnnnnnnnnnnnnnnnnnnnnnnnnnnnnnnnnnnnnnnnnnnnnnnnnnnnnnnnnnnnnnnnnnnnnnnnnnnnnnnnnnnnnnnnnnnnnnnnnnnnnnnnnnnnnnnnnnnnnnnnnnnnnnnnnnnnnnnnnnnnnnnnnnnnnnnnnnnnnnnnnnnnnnnnnnnnnnnnnnnnnnnnnnnnnnnnnnnnnnnnnnnnnnnnnnnnnnnnnnnnnnnnnnnnnnnnnnnnnnnnnnnnnnnnnnnnnnnnnnnnnnnnnnnnnnnnnnnnnnnnnnnnnnnnnnnnnnnnnnnnnnnnnnnnnnnnnnnnnnnnnnnnnnnnnnnnnnnnnnnnnnnnnnnnnnnnnnnnnnnnnnnnnnnnnnnnnnnnnnnnnnnnnnnnnnnnnnnnnnnnnnnnnnnnnnnnnnnnnnnnnnnnnnnnnnnnnnnnnnnnnnnnnnnnnnnnnnnnnnnnnnnnnnnnnnnnnnnnnnnnnnnnnnnnnnnnnnnnnnnnnnnnnnnnnnnnnnnnnnnnnnnnnnnnnnnnnnnnnnnnnnnnnnnnnnnnnnnnnnnnnnnnnnnnnnnnnnnnnnnnnnnnnnnnnnnnnnnnnnnnnnnnnnnnnnnnnnnnnnnnnnnnnnnnnnnnnnnnnnnnnnnnnnnnnnnnnnnnnnnnnnnnnnnnnnnnnnnnnnnnnnnnnnnnnnnnnnnnnnnnnnnnnnnnnnnnnnnnnnnnnnnnnnnnnnnnnnnnnnnnnnnnnnnnnnnnnnnnnnnnnnnnnnnnnnnnnnnnnnnnnnnnnnnnnnnnnnnnnnnnnnnnnnnnnnnnnnnnnnnnnnnnnnnnnnnnnnnnnnnnnnnnnnnnnnnnnnnnnnnnnnnnnnnnnnnnnnnnnnnnnnnnnnnnnnnnnnnnnnnnnnnnnnnnnnnnnnnnnnnnnnnnnnnnnnnnnnnnnnnnnnnnnnnnnnnnnnnnnnnnnnnnnnnnnnnnnnnnnnnnnnnnnnnnnnnnnnnnnnnnnnnnnnnnnnnnnnnnnnnnnnnnnnnnnnnnnnnnnnnnnnnnnnnnnnnnnnnnnnnnnnnnnnnnnnnnnnnnnnnnnnnnnnnnnnnnnnnnnnnnnnnnnnnnnnnnnnnnnnnnnnnnnnnnnnnnnnnnnnnnnnnnnnnnnnnnnnnnnnnnnnnnnnnnnnnnnnnnnnnnnnnnnnnnnnnnnnnnnnnnnnnnnnnnnnnnnnnnnnnnnnnnnnnnnnnnnnnnnnnnnnnnnnnnnnnnnnnnnnnnnnnnnnnnnnnnnnnnnnnnnnnnnnnnnnnnnnnnnnnnnnnnnnnnnnnnnnnnnnnnnnnnnnnnnnnnnnnnnnnnnnnnnnnnnnnnnnnnnnnnnnnnnnnnnnnnnnnnnnnnnnnnnnnnnnnnnnnnnnnnnnnnnnnnnnnnnnnnnnnnnnnnnnnnnnnnnnnnnnnnnnnnnnnnnnnnnnnnnnnnnnnnnnnnnnnnnnnnnnnnnnnnnnnnnnnnnnnnnnnnnnnnnnnnnnnnnnnnnnnnnnnnnnnnnnnnnnnnnnnnnnnnnnnnnnnnnnnnnnnnnnnnnnnnnnnnnnnnnnnnnnnnnnnnnnnnnnnnnnnnnnnnnnnnnnnnnnnnnnnnnnnnnnnnnnnnnnnnnnnnnnnnnnnnnnnnnnnnnnnnnnnnnnnnnnnnnnnnnnnnnnnnnnnnnnnnnnnnnnnnnnnnnnnnnnnnnnnnnnnnnnnnnnnnnnnnnnnnnnnnnnnnnnnnnnnnnnnnnnnnnnnnnnnnnnnnnnnnnnnnnnnnnnnnnnnnnnnnnnnnnnnnnnnnnnnnnnnnnnnnnnnnnnnnnnnnnnnnnnnnnnnnnnnnnnnnnnnnnnnnnnnnnnnnnnnnnnnnnnnnnnnnnnnnnnnnnnnnnnnnnnnnnnnnnnnnnnnnnnnnnnnnnnnnnnnnnnnnnnnnnnnnnnnnnnnnnnnnnnnnnnnnnnnnnnnnnnnnnnnnnnnnnnnnnnnnnnnnnnnnnnnnnnnnnnnnnnnnnnnnnnnnnnnnnnnnnnnnnnnnnnnnnnnnnnnnnnnnnnnnnnnnnnnnnnnnnnnnnnnnnnnnnnnnnnnnnnnnnnnnnnnnnnnnnnnnnnnnnnnnnnnnnnnnnnnnnnnnnnnnnnnnnnnnnnnnnnnnnnnnnnnnnnnnnnnnnnnnnnnnnnnnnnnnnnnnnnnnnnnnnnnnnnnnnnnnnnnnnnnnnnnnnnnnnnnnnnnnnnnnnnnnnnnnnnnnnnnnnnnnnnnnnnnnnnnnnnnnnnnnnnnnnnnnnnnnnnnnnnnnnnnnnnnnnnnnnnnnnnnnnnnnnnnnnnnnnnnnnnnnnnnnnnnnnnnnnnnnnnnnnnnnnnnnnnnnnnnnnnnnnnnnnnnnnnnnnnnnnnnnnnnnnnnnnnnnnnnnnnnnnnnnnnnnnnnnnnnnnnnnnnnnnnnnnnnnnnnnnnnnnnnnnnnnnnnnnnnnnnnnnnnnnnnnnnnnnnnnnnnnnnnnnnnnnnnnnnnnnnnnnnnnnnnnnnnnnnnnnnnnnnnnnnnnnnnnnnnnnnnnnnnnnnnnnnnnnnnnnnnnnnnnnnnnnnnnnnnnnnnnnnnnnnnnnnnnnnnnnnnnnnnnnnnnnnnnnnnnnnnnnnnnnnnnnnnnnnnnnnnnnnnnnnnnnnnnnnnnnnnnnnnnnnnnnnnnnnnnnnnnnnnnnnnnnnnnnnnnnnnnnnnnnnnnnnnnnnnnnnnnnnnnnnnnnnnnnnnnnnnnnnnnnnnnnnnnnnnnnnnnnnnnnnnnnnnnnnnnnnnnnnnnnnnnnnnnnnnnnnnnnnnnnnnnnnnnnnnnnnnnnnnnnnnnnnnnnnnnnnnnnnnnnnnnnnnnnnnnnnnnnnnnnnnnnnnnnnnnnnnnnnnnnnnnnnnnnnnnnnnnnnnnnnnnnnnnnnnnnnnnnnnnnnnnnnnnnnnnnnnnnnnnnnnnnnnnnnnnnnnnnnnnnnnnnnnnnnnnnnnnnnnnnnnnnnnnnnnnnnnnnnnnnnnnnnnnnnnnnnnnnnnnnnnnnnnnnnnnnnnnnnnnnnnnnnnnnnnnnnnnnnnnnnnnnnnnnnnnnnnnnnnnnnnnnnnnnnnnnnnnnnnnnnnnnnnnnnnnnnnnnnnnnnnnnnnnnnnnnnnnnnnnnnnnnnnnnnnnnnnnnnnnnnnnnnnnnnnnnnnnnnnnnnnnnnnnnnnnnnnnnnnnnnnnnnnnnnnnnnnnnnnnnnnnnnnnnnnnnnnnnnnnnnnnnnnnnnnnnnnnnnnnnnnnnnnnnnnnnnnnnnnnnnnnnnnnnnnnnnnnnnnnnnnnnnnnnnnnnnnnnnnnnnnnnnnnnnnnnnnnnnnnnnnnnnnnnnnnnnnnnnnnnnnnnnnnnnnnnnnnnnnnnnnnnnnnnnnnnnnnnnnnnnnnnnnnnnnnnnnnnnnnnnnnnnnnnnnnnnnnnnnnnnnnnnnnnnnnnnnnnnnnnnnnnnnnnnnnnnnnnnnnnnnnnnnnnnnnnnnnnnnnnnnnnnnnnnnnnnnnnnnnnnnnnnnnnnnnnnnnnnnnnnnnnnnnnnnnnnnnnnnnnnnnnnnnnnnnnnnnnnnnnnnnnnnnnnnnnnnnnnnnnnnnnnnnnnnnnnnnnnnnnnnnnnnnnnnnnnnnnnnnnnnnnnnnnnnnnnnnnnnnnnnnnnnnnnnnnnnnnnnnnnnnnnnnnnnnnnnnnnnnnnnnnnnnnnnnnnnnnnnnnnnnnnnnnnnnnnnnnnnnnnnnnnnnnnnnnnnnnnnnnnnnnnnnnnnnnnnnnnnnnnnnnnnnnnnnnnnnnnnnnnnnnnnnnnnnnnnnnnnnnnnnnnnnnnnnnnnnnnnnnnnnnnnnnnnnnnnnnnnnnnnnnnnnnnnnnnnnnnnnnnnnnnnnnnnnnnnnnnnnnnnnnnnnnnnnnnnnnnnnnnnnnnnnnnnnnnnnnnnnnnnnnnnnnnnnnnnnnnnnnnnnnnnnnnnnnnnnnnnnnnnnnnnnnnnnnnnnnnnnnnnnnnnnnnnnnnnnnnnnnnnnnnnnnnnnnnnnnnnnnnnnnnnnnnnnnnnnnnnnnnnnnnnnnnnnnnnnnnnnnnnnnnnnnnnnnnnnnnnnnnnnnnnnnnnnnnnnnnnnnnnnnnnnnnnnnnnnnnnnnnnnnnnnnnnnnnnnnnnnnnnnnnnnnnnnnnnnnnnnnnnnnnnnnnnnnnnnnnnnnnnnnnnnnnnnnnnnnnnnnnnnnnnnnnnnnnnnnnnnnnnnnnnnnnnnnnnnnnnnnnnnnnnnnnnnnnnnnnnnnnnnnnnnnnnnnnnnnnnnnnnnnnnnnnnnnnnnnnnnnnnnnnnnnnnnnnnnnnnnnnnnnnnnnnnnnnnnnnnnnnnnnnnnnnnnnnnnnnnnnnnnnnnnnnnnnnnnnnnnnnnnnnnnnnnnnnnnnnnnnnnnnnnnnnnnnnnnnnnnnnnnnnnnnnnnnnnnnnnnnnnnnnnnnnnnnnnnnnnnnnnnnnnnnnnnnnnnnnnnnnnnnnnnnnnnnnnnnnnnnnnnnnnnnnnnnnnnnnnnnnnnnnnnnnnnnnnnnnnnnnnnnnnnnnnnnnnnnnnnnnnnnnnnnnnnnnnnnnnnnnnnnnnnnnnnnnnnnnnnnnnnnnnnnnnnnnnnnnnnnnnnnnnnnnnnnnnnnnnnnnnnnnnnnnnnnnnnnnnnnnnnnnnnnnnnnnnnnnnnnnnnnnnnnnnnnnnnnnnnnnnnnnnnnnnnnnnnnnnnnnnnnnnnnnnnnnnnnnnnnnnnnnnnnnnnnnnnnnnnnnnnnnnnnnnnnnnnnnnnnnnnnnnnnnnnnnnnnnnnnnnnnnnnnnnnnnnnnnnnnnnnnnnnnnnnnnnnnnnnnnnnnnnnnnnnnnnnnnnnnnnnnnnnnnnnnnnnnnnnnnnnnnnnnnnnnnnnnnnnnnnnnnnnnnnnnnnnnnnnnnnnnnnnnnnnnnnnnnnnnnnnnnnnnnnnnnnnnnnnnnnnnnnnnnnnnnnnnnnnnnnnnnnnnnnnnnnnnnnnnnnnnnnnnnnnnnnnnnnnnnnnnnnnnnnnnnnnnnnnnnnnnnnnnnnnnnnnnnnnnnnnnnnnnnnnnnnnnnnnnnnnnnnnnnnnnnnnnnnnnnnnnnnnnnnnnnnnnnnnnnnnnnnnnnnnnnnnnnnnnnnnnnnnnnnnnnnnnnnnnnnnnnnnnnnnnnnnnnnnnnnnnnnnnnnnnnnnnnnnnnnnnnnnnnnnnnnnnnnnnnnnnnnnnnnnnnnnnnnnnnnnnnnnnnnnnnnnnnnnnnnnnnnnnnnnnnnnnnnnnnnnnnnnnnnnnnnnnnnnnnnnnnnnnnnnnnnnnnnnnnnnnnnnnnnnnnnnnnnnnnnnnnnnnnnnnnnnnnnnnnnnnnnnnnnnnnnnnnnnnnnnnnnnnnnnnnnnnnnnnnnnnnnnnnnnnnnnnnnnnnnnnnnnnnnnnnnnnnnnnnnnnnnnnnnnnnnnnnnnnnnnnnnnnnnnnnnnnnnnnnnnnnnnnnnnnnnnnnnnnnnnnnnnnnnnnnnnnnnnnnnnnnnnnnnnnnnnnnnnnnnnnnnnnnnnnnnnnnnnnnnnnnnnnnnnnnnnnnnnnnnnnnnnnnnnnnnnnnnnnnnnnnnnnnnnnnnnnnnnnnnnnnnnnnnnnnnnnnnnnnnnnnnnnnnnnnnnnnnnnnnnnnnnnnnnnnnnnnnnnnnnnnnnnnnnnnnnnnnnnnnnnnnnnnnnnnnnnnnnnnnnnnnnnnnnnnnnnnnnnnnnnnnnnnnnnnnnnnnnnnnnnnnnnnnnnnnnnnnnnnnnnnnnnnnnnnnnnnnnnnnnnnnnnnnnnnnnnnnnnnnnnnnnnnnnnnnnnnnnnnnnnnnnnnnnnnnnnnnnnnnnnnnnnnnnnnnnnnnnnnnnnnnnnnnnnnnnnnnnnnnnnnnnnnnnnnnnnnnnnnnnnnnnnnnnnnnnnnnnnnnnnnnnnnnnnnnnnnnnnnnnnnnnnnnnnnnnnnnnnnnnnnnnnnnnnnnnnnnnnnnnnnnnnnnnnnnnnnnnnnnnnnnnnnnnnnnnnnnnnnnnnnnnnnnnnnnnnnnnnnnnnnnnnnnnnnnnnnnnnnnnnnnnnnnnnnnnnnnnnnnnnnnnnnnnnnnnnnnnnnnnnnnnnnnnnnnnnnnnnnnnnnnnnnnnnnnnnnnnnnnnnnnnnnnnnnnnnnnnnnnnnnnnnnnnnnnnnnnnnnnnnnnnnnnnnnnnnnnnnnnnnnnnnnnnnnnnnnnnnnnnnnnnnnnnnnnnnnnnnnnnnnnnnnnnnnnnnnnnnnnnnnnnnnnnnnnnnnnnnnnnnnnnnnnnnnnnnnnnnnnnnnnnnnnnnnnnnnnnnnnnnnnnnnnnnnnnnnnnnnnnnnnnnnnnnnnnnnnnnnnnnnnnnnnnnnnnnnnnnnnnnnnnnnnnnnnnnnnnnnnnnnnnnnnnnnnnnnnnnnnnnnnnnnnnnnnnnnnnnnnnnnnnnnnnnnnnnnnnnnnnnnnnnnnnnnnnnnnnnnnnnnnnnnnnnnnnnnnnnnnnnnnnnnnnnnnnnnnnnnnnnnnnnnnnnnnnnnnnnnnnnnnnnnnnnnnnnnnnnnnnnnnnnnnnnnnnnnnnnnnnnnnnnnnnnnnnnnnnnnnnnnnnnnnnnnnnnnnnnnnnnnnnnnnnnnnnnnnnnnnnnnnnnnnnnnnnnnnnnnnnnnnnnnnnnnnnnnnnnnnnnnnnnnnnnnnnnnnnnnnnnnnnnnnnnnnnnnnnnnnnnnnnnnnnnnnnnnnnnnnnnnnnnnnnnnnnnnnnnnnnnnnnnnnnnnnnnnnnnnnnnnnnnnnnnnnnnnnnnnnnnnnnnnnnnnnnnnnnnnnnnnnnnnnnnnnnnnnnnnnnnnnnnnnnnnnnnnnnnnnnnnnnnnnnnnnnnnnnnnnnnnnnnnnnnnnnnnnnnnnnnnnnnnnnnnnnnnnnnnnnnnnnnnnnnnnnnnnnnnnnnnnnnnnnnnnnnnnnnnnnnnnnnnnnnnnnnnnnnnnnnnnnnnnnnnnnnnnnnnnnnnnnnnnnnnnnnnnnnnnnnnnnnnnnnnnnnnnnnnnnnnnnnnnnnnnnnnnnnnnnnnnnnnnnnnnnnnnnnnnnnnnnnnnnnnnnnnnnnnnnnnnnnnnnnnnnnnnnnnnnnnnnnnnnnnnnnnnnnnnnnnnnnnnnnnnnnnnnnnnnnnnnnnnnnnnnnnnnnnnnnnnnnnnnnnnnnnnnnnnnnnnnnnnnnnnnnnnnnnnnnnnnnnnnnnnnnnnnnnnnnnnnnnnnnnnnnnnnnnnnnnnnnnnnnnnnnnnnnnnnnnnnnnnnnnnnnnnnnnnnnnnnnnnnnnnnnnnnnnnnnnnnnnnnnnnnnnnnnnnnnnnnnnnnnnnnnnnnnnnnnnnnnnnnnnnnnnnnnnnnnnnnnnnnnnnnnnnnnnnnnnnnnnnnnnnnnnnnnnnnnnnnnnnnnnnnnnnnnnnnnnnnnnnnnnnnnnnnnnnnnnnnnnnnnnnnnnnnnnnnnnnnnnnnnnnnnnnnnnnnnnnnnnnnnnnnnnnnnnnnnnnnnnnnnnnnnnnnnnnnnnnnnnnnnnnnnnnnnnnnnnnnnnnnnnnnnnnnnnnnnnnnnnnnnnnnnnnnnnnnnnnnnnnnnnnnnnnnnnnnnnnnnnnnnnnnnnnnnnnnnnnnnnnnnnnnnnnnnnnnnnnnnnnnnnnnnnnnnnnnnnnnnnnnnnnnnnnnnnnnnnnnnnnnnnnnnnnnnnnnnnnnnnnnnnnnnnnnnnnnnnnnnnnnnnnnnnnnnnnnnnnnnnnnnnnnnnnnnnnnnnnnnnnnnnnnnnnnnnnnnnnnnnnnnnnnnnnnnnnnnnnnnnnnnnnnnnnnnnnnnnnnnnnnnnnnnnnnnnnnnnnnnnnnnnnnnnnnnnnnnnnnnnnnnnnnnnnnnnnnnnnnnnnnnnnnnnnnnnnnnnnnnnnnnnnnnnnnnnnnnnnnnnnnnnnnnnnnnnnnnnnnnnnnnnnnnnnnnnnnnnnnnnnnnnnnnnnnnnnnnnnnnnnnnnnnnnnnnnnnnnnnnnnnnnnnnnnnnnnnnnnnnnnnnnnnnnnnnnnnnnnnnnnnnnnnnnnnnnnnnnnnnnnnnnnnnnnnnnnnnnnnnnnnnnnnnnnnnnnnnnnnnnnnnnnnnnnnnnnnnnnnnnnnnnnnnnnnnnnnnnnnnnnnnnnnnnnnnnnnnnnnnnnnnnnnnnnnnnnnnnnnnnnnnnnnnnnnnnnnnnnnnnnnnnnnnnnnnnnnnnnnnnnnnnnnnnnnnnnnnnnnnnnnnnnnnnnnnnnnnnnnnnnnnnnnnnnnnnnnnnnnnnnnnnnnnnnnnnnnnnnnnnnnnnnnnnnnnnnnnnnnnnnnnnnnnnnnnnnnnnnnnnnnnnnnnnnnnnnnnnnnnnnnnnnnnnnnnnnnnnnnnnnnnnnnnnnnnnnnnnnnnnnnnnnnnnnnnnnnnnnnnnnnnnnnnnnnnnnnnnnnnnnnnnnnnnnnnnnnnnnnnnnnnnnnnnnnnnnnnnnnnnnnnnnnnnnnnnnnnnnnnnnnnnnnnnnnnnnnnnnnnnnnnnnnnnnnnnnnnnnnnnnnnnnnnnnnnnnnnnnnnnnnnnnnnnnnnnnnnnnnnnnnnnnnnnnnnnnnnnnnnnnnnnnnnnnnnnnnnnnnnnnnnnnnnnnnnnnnnnnnnnnnnnnnnnnnnnnnnnnnnnnnnnnnnnnnnnnnnnnnnnnnnnnnnnnnnnnnnnnnnnnnnnnnnnnnnnnnnnnnnnnnnnnnnnnnnnnnnnnnnnnnnnnnnnnnnnnnnnnnnnnnnnnnnnnnnnnnnnnnnnnnnnnnnnnnnnnnnnnnnnnnnnnnnnnnnnnnnnnnnnnnnnnnnnnnnnnnnnnnnnnnnnnnnnnnnnnnnnnnnnnnnnnnnnnnnnnnnnnnnnnnnnnnnnnnnnnnnnnnnnnnnnnnnnnnnnnnnnnnnnnnnnnnnnnnnnnnnnnnnnnnnnnnnnnnnnnnnnnnnnnnnnnnnnnnnnnnnnnnnnnnnnnnnnnnnnnnnnnnnnnnnnnnnnnnnnnnnnnnnnnnnnnnnnnnnnnnnnnnnnnnnnnnnnnnnnnnnnnnnnnnnnnnnnnnnnnnnnnnnnnnnnnnnnnnnnnnnnnnnnnnnnnnnnnnnnnnnnnnnnnnnnnnnnnnnnnnnnnnnnnnnnnnnnnnnnnnnnnnnnnnnnnnnnnnnnnnnnnnnnnnnnnnnnnnnnnnnnnnnnnnnnnnnnnnnnnnnnnnnnnnnnnnnnnnnnnnnnnnnnnnnnnnnnnnnnnnnnnnnnnnnnnnnnnnnnnnnnnnnnnnnnnnnnnnnnnnnnnnnnnnnnnnnnnnnnnnnnnnnnnnnnnnnnnnnnnnnnnnnnnnnnnnnnnnnnnnnnnnnnnnnnnnnnnnnnnnnnnnnnnnnnnnnnnnnnnnnnnnnnnnnnnnnnnnnnnnnnnnnnnnnnnnnnnnnnnnnnnnnnnnnnnnnnnnnnnnnnnnnnnnnnnnnnnnnnnnnnnnnnnnnnnnnnnnnnnnnnnnnnnnnnnnnnnnnnnnnnnnnnnnnnnnnnnnnnnnnnnnnnnnnnnnnnnnnnnnnnnnnnnnnnnnnnnnnnnnnnnnnnnnnnnnnnnnnnnnnnnnnnnnnnnnnnnnnnnnnnnnnnnnnnnnnnnnnnnnnnnnnnnnnnnnnnnnnnnnnnnnnnnnnnnnnnnnnnnnnnnnnnnnnnnnnnnnnnnnnnnnnnnnnnnnnnnnnnnnnnnnnnnnnnnnnnnnnnnnnnnnnnnnnnnnnnnnnnnnnnnnnnnnnnnnnnnnnnnnnnnnnnnnnnnnnnnnnnnnnnnnnnnnnnnnnnnnnnnnnnnnnnnnnnnnnnnnnnnnnnnnnnnnnnnnnnnnnnnnnnnnnnnnnnnnnnnnnnnnnnnnnnnnnnnnnnnnnnnnnnnnnnnnnnnnnnnnnnnnnnnnnnnnnnnnnnnnnnnnnnnnnnnnnnnnnnnnnnnnnnnnnnnnnnnnnnnnnnnnnnnnnnnnnnnnnnnnnnnnnnnnnnnnnnnnnnnnnnnnnnnnnnnnnnnnnnnnnnnnnnnnnnnnnnnnnnnnnnnnnnnnnnnnnnnnnnnnnnnnnnnnnnnnnnnnnnnnnnnnnnnnnnnnnnnnnnnnnnnnnnnnnnnnnnnnnnnnnnnnnnnnnnnnnnnnnnnnnnnnnnnnnnnnnnnnnnnnnnnnnnnnnnnnnnnnnnnnnnnnnnnnnnnnnnnnnnnnnnnnnnnnnnnnnnnnnnnnnnnnnnnnnnnnnnnnnnnnnnnnnnnnnnnnnnnnnnnnnnnnnnnnnnnnnnnnnnnnnnnnnnnnnnnnnnnnnnnnnnnnnnnnnnnnnnnnnnnnnnnnnnnnnnnnnnnnnnnnnnnnnnnnnnnnnnnnnnnnnnnnnnnnnnnnnnnnnnnnnnnnnnnnnnnnnnnnnnnnnnnnnnnnnnnnnnnnnnnnnnnnnnnnnnnnnnnnnnnnnnnnnnnnnnnnnnnnnnnnnnnnnnnnnnnnnnnnnnnnnnnnnnnnnnnnnnnnnnnnnnnnnnnnnnnnnnnnnnnnnnnnnnnnnnnnnnnnnnnnnnnnnnnnnnnnnnnnnnnnnnnnnnnnnnnnnnnnnnnnnnnnnnnnnnnnnnnnnnnnnnnnnnnnnnnnnnnnnnnnnnnnnnnnnnnnnnnnnnnnnnnnnnnnnnnnnnnnnnnnnnnnnnnnnnnnnnnnnnnnnnnnnnnnnnnnnnnnnnnnnnnnnnnnnnnnnnnnnnnnnnnnnnnnnnnnnnnnnnnnnnnnnnnnnnnnnnnnnnnnnnnnnnnnnnnnnnnnnnnnnnnnnnnnnnnnnnnnnnnnnnnnnnnnnnnnnnnnnnnnnnnnnnnnnnnnnnnnnnnnnnnnnnnnnnnnnnnnnnnnnnnnnnnnnnnnnnnnnnnnnnnnnnnnnnnnnnnnnnnnnnnnnnnnnnnnnnnnnnnnnnnnnnnnnnnnnnnnnnnnnnnnnnnnnnnnnnnnnnnnnnnnnnnnnnnnnnnnnnnnnnnnnnnnnnnnnnnnnnnnnnnnnnnnnnnnnnnnnnnnnnnnnnnnnnnnnnnnnnnnnnnnnnnnnnnnnnnnnnnnnnnnnnnnnnnnnnnnnnnnnnnnnnnnnnnnnnnnnnnnnnnnnnnnnnnnnnnnnnnnnnnnnnnnnnnnnnnnnnnnnnnnnnnnnnnnnnnnnnnnnnnnnnnnnnnnnnnnnnnnnnnnnnnnnnnnnnnnnnnnnnnnnnnnnnnnnnnnnnnnnnnnnnnnnnnnnnnnnnnnnnnnnnnnnnnnnnnnnnnnnnnnnnnnnnnnnnnnnnnnnnnnnnnnnnnnnnnnnnnnnnnnnnnnnnnnnnnnnnnnnnnnnnnnnnnnnnnnnnnnnnnnnnnnnnnnnnnnnnnnnnnnnnnnnnnnnnnnnnnnnnnnnnnnnnnnnnnnnnnnnnnnnnnnnnnnnnnnnnnnnnnnnnnnnnnnnnnnnnnnnnnnnnnnnnnnnnnnnnnnnnnnnnnnnnnnnnnnnnnnnnnnnnnnnnnnnnnnnnnnnnnnnnnnnnnnnnnnnnnnnnnnnnnnnnnnnnnnnnnnnnnnnnnnnnnnnnnnnnnnnnnnnnnnnnnnnnnnnnnnnnnnnnnnnnnnnnnnnnnnnnnnnnnnnnnnnnnnnnnnnnnnnnnnnnnnnnnnnnnnnnnnnnnnnnnnnnnnnnnnnnnnnnnnnnnnnnnnnnnnnnnnnnnnnnnnnnnnnnnnnnnnnnnnnnnnnnnnnnnnnnnnnnnnnnnnnnnnnnnnnnnnnnnnnnnnnnnnnnnnnnnnnnnnnnnnnnnnnnnnnnnnnnnnnnnnnnnnnnnnnnnnnnnnnnnnnnnnnnnnnnnnnnnnnnnnnnnnnnnnnnnnnnnnnnnnnnnnnnnnnnnnnnnnnnnnnnnnnnnnnnnnnnnnnnnnnnnnnnnnnnnnnnnnnnnnnnnnnnnnnnnnnnnnnnnnnnnnnnnnnnnnnnnnnnnnnnnnnnnnnnnnnnnnnnnnnnnnnnnnnnnnnnnnnnnnnnnnnnnnnnnnnnnnnnnnnnnnnnnnnnnnnnnnnnnnnnnnnnnnnnnnnnnnnnnnnnnnnnnnnnnnnnnnnnnnnnnnnnnnnnnnnnnnnnnnnnnnnnnnnnnnnnnnnnnnnnnnnnnnnnnnnnnnnnnnnnnnnnnnnnnnnnnnnnnnnnnnnnnnnnnnnnnnnnnnnnnnnnnnnnnnnnnnnnnnnnnnnnnnnnnnnnnnnnnnnnnnnnnnnnnnnnnnnnnnnnnnnnnnnnnnnnnnnnnnnnnnnnnnnnnnnnnnnnnnnnnnnnnnnnnnnnnnnnnnnnnnnnnnnnnnnnnnnnnnnnnnnnnnnnnnnnnnnnnnnnnnnnnnnnnnnnnnnnnnnnnnnnnnnnnnnnnnnnnnnnnnnnnnnnnnnnnnnnnnnnnnnnnnnnnnnnnnnnnnnnnnnnnnnnnnnnnnnnnnnnnnnnnnnnnnnnnnnnnnnnnnnnnnnnnnnnnnnnnnnnnnnnnnnnnnnnnnnnnnnnnnnnnnnnnnnnnnnnnnnnnnnnnnnnnnnnnnnnnnnnnnnnnnnnnnnnnnnnnnnnnnnnnnnnnnnnnnnnnnnnnnnnnnnnnnnnnnnnnnnnnnnnnnnnnnnnnnnnnnnnnnnnnnnnnnnnnnnnnnnnnnnnnnnnnnnnnnnnnnnnnnnnnnnnnnnnnnnnnnnnnnnnnnnnnnnnnnnnnnnnnnnnnnnnnnnnnnnnnnnnnnnnnnnnnnnnnnnnnnnnnnnnnnnnnnnnnnnnnnnnnnnnnnnnnnnnnnnnnnnnnnnnnnnnnnnnnnnnnnnnnnnnnnnnnnnnnnnnnnnnnnnnnnnnnnnnnnnnnnnnnnnnnnnnnnnnnnnnnnnnnnnnnnnnnnnnnnnnnnnnnnnnnnnnnnnnnnnnnnnnnnnnnnnnnnnnnnnnnnnnnnnnnnnnnnnnnnnnnnnnnnnnnnnnnnnnnnnnnnnnnnnnnnnnnnnnnnnnnnnnnnnnnnnnnnnnnnnnnnnnnnnnnnnnnnnnnnnnnnnnnnnnnnnnnnnnnnnnnnnnnnnnnnnnnnnnnnnnnnnnnnnnnnnnnnnnnnnnnnnnnnnnnnnnnnnnnnnnnnnnnnnnnnnnnnnnnnnnnnnnnnnnnnnnnnnnnnnnnnnnnnnnnnnnnnnnnnnnnnnnnnnnnnnnnnnnnnnnnnnnnnnnnnnnnnnnnnnnnnnnnnnnnnnnnnnnnnnnnnnnnnnnnnnnnnnnnnnnnnnnnnnnnnnnnnnnnnnnnnnnnnnnnnnnnnnnnnnnnnnnnnnnnnnnnnnnnnnnnnnnnnnnnnnnnnnnnnnnnnnnnnnnnnnnnnnnnnnnnnnnnnnnnnnnnnnnnnnnnnnnnnnnnnnnnnnnnnnnnnnnnnnnnnnnnnnnnnnnnnnnnnnnnnnnnnnnnnnnnnnnnnnnnnnnnnnnnnnnnnnnnnnnnnnnnnnnnnnnnnnnnnnnnnnnnnnnnnnnnnnnnnnnnnnnnnnnnnnnnnnnnnnnnnnnnnnnnnnnnnnnnnnnnnnnnnnnnnnnnnnnnnnnnnnnnnnnnnnnnnnnnnnnnnnnnnnnnnnnnnnnnnnnnnnnnnnnnnnnnnnnnnnnnnnnnnnnnnnnnnnnnnnnnnnnnnnnnnnnnnnnnnnnnnnnnnnnnnnnnnnnnnnnnnnnnnnnnnnnnnnnnnnnnnnnnnnnnnnnnnnnnnnnnnnnnnnnnnnnnnnnnnnnnnnnnnnnnnnnnnnnnnnnnnnnnnnnnnnnnnnnnnnnnnnnnnnnnnnnnnnnnnnnnnnnnnnnnnnnnnnnnnnnnnnnnnnnnnnnnnnnnnnnnnnnnnnnnnnnnnnnnnnnnnnnnnnnnnnnnnnnnnnnnnnnnnnnnnnnnnnnnnnnnnnnnnnnnnnnnnnnnnnnnnnnnnnnnnnnnnnnnnnnnnnnnnnnnnnnnnnnnnnnnnnnnnnnnnnnnnnnnnnnnnnnnnnnnnnnnnnnnnnnnnnnnnnnnnnnnnnnnnnnnnnnnnnnnnnnnnnnnnnnnnnnnnnnnnnnnnnnnnnnnnnnnnnnnnnnnnnnnnnnnnnnnnnnnnnnnnnnnnnnnnnnnnnnnnnnnnnnnnnnnnnnnnnnnnnnnnnnnnnnnnnnnnnnnnnnnnnnnnnnnnnnnnnnnnnnnnnnnnnnnnnnnnnnnnnnnnnnnnnnnnnnnnnnnnnnnnnnnnnnnnnnnnnnnnnnnnnnnnnnnnnnnnnnnnnnnnnnnnnnnnnnnnnnnnnnnnnnnnnnnnnnnnnnnnnnnnnnnnnnnnnnnnnnnnnnnnnnnnnnnnnnnnnnnnnnnnnnnnnnnnnnnnnnnnnnnnnnnnnnnnnnnnnnnnnnnnnnnnnnnnnnnnnnnnnnnnnnnnnnnnnnnnnnnnnnnnnnnnnnnnnnnnnnnnnnnnnnnnnnnnnnnnnnnnnnnnnnnnnnnnnnnnnnnnnnnnnnnnnnnnnnnnnnnnnnnnnnnnnnnnnnnnnnnnnnnnnnnnnnnnnnnnnnnnnnnnnnnnnnnnnnnnnnnnnnnnnnnnnnnnnnnnnnnnnnnnnnnnnnnnnnnnnnnnnnnnnnnnnnnnnnnnnnnnnnnnnnnnnnnnnnnnnnnnnnnnnnnnnnnnnnnnnnnnnnnnnnnnnnnnnnnnnnnnnnnnnnnnnnnnnnnnnnnnnnnnnnnnnnnnnnnnnnnnnnnnnnnnnnnnnnnnnnnnnnnnnnnnnnnnnnnnnnnnnnnnnnnnnnnnnnnnnnnnnnnnnnnnnnnnnnnnnnnnnnnnnnnnnnnnnnnnnnnnnnnnnnnnnnnnnnnnnnnnnnnnnnnnnnnnnnnnnnnnnnnnnnnnnnnnnnnnnnnnnnnnnnnnnnnnnnnnnnnnnnnnnnnnnnnnnnnnnnnnnnnnnnnnnnnnnnnnnnnnnnnnnnnnnnnnnnnnnnnnnnnnnnnnnnnnnnnnnnnnnnnnnnnnnnnnnnnnnnnnnnnnnnnnnnnnnnnnnnnnnnnnnnnnnnnnnnnnnnnnnnnnnnnnnnnnnnnnnnnnnnnnnnnnnnnnnnnnnnnnnnnnnnnnnnnnnnnnnnnnnnnnnnnnnnnnnnnnnnnnnnnnnnnnnnnnnnnnnnnnnnnnnnnnnnnnnnnnnnnnnnnnnnnnnnnnnnnnnnnnnnnnnnnnnnnnnnnnnnnnnnnnnnnnnnnnnnnnnnnnnnnnnnnnnnnnnnnnnnnnnnnnnnnnnnnnnnnnnnnnnnnnnnnnnnnnnnnnnnnnnnnnnnnnnnnnnnnnnnnnnnnnnnnnnnnnnnnnnnnnnnnnnnnnnnnnnnnnnnnnnnnnnnnnnnnnnnnnnnnnnnnnnnnnnnnnnnnnnnnnnnnnnnnnnnnnnnnnnnnnnnnnnnnnnnnnnnnnnnnnnnnnnnnnnnnnnnnnnnnnnnnnnnnnnnnnnnnnnnnnnnnnnnnnnnnnnnnnnnnnnnnnnnnnnnnnnnnnnnnnnnnnnnnnnnnnnnnnnnnnnnnnnnnnnnnnnnnnnnnnnnnnnnnnnnnnnnnnnnnnnnnnnnnnnnnnnnnnnnnnnnnnnnnnnnnnnnnnnnnnnnnnnnnnnnnnnnnnnnnnnnnnnnnnnnnnnnnnnnnnnnnnnnnnnnnnnnnnnnnnnnnnnnnnnnnnnnnnnnnnnnnnnnnnnnnnnnnnnnnnnnnnnnnnnnnnnnnnnnnnnnnnnnnnnnnnnnnnnnnnnnnnnnnnnnnnnnnnnnnnnnnnnnnnnnnnnnnnnnnnnnnnnnnnnnnnnnnnnnnnnnnnnnnnnnnnnnnnnnnnnnnnnnnnnnnnnnnnnnnnnnnnnnnnnnnnnnnnnnnnnnnnnnnnnnnnnnnnnnnnnnnnnnnnnnnnnnnnnnnnnnnnnnnnnnnnnnnnnnnnnnnnnnnnnnnnnnnnnnnnnnnnnnnnnnnnnnnnnnnnnnnnnnnnnnnnnnnnnnnnnnnnnnnnnnnnnnnnnnnnnnnnnnnnnnnnnnnnnnnnnnnnnnnnnnnnnnnnnnnnnnnnnnnnnnnnnnnnnnnnnnnnnnnnnnnnnnnnnnnnnnnnnnnnnnnnnnnnnnnnnnnnnnnnnnnnnnnnnnnnnnnnnnnnnnnnnnnnnnnnnnnnnnnnnnnnnnnnnnnnnnnnnnnnnnnnnnnnnnnnnnnnnnnnnnnnnnnnnnnnnnnnnnnnnnnnnnnnnnnnnnnnnnnnnnnnnnnnnnnnnnnnnnnnnnnnnnnnnnnnnnnnnnnnnnnnnnnnnnnnnnnnnnnnnnnnnnnnnnnnnnnnnnnnnnnnnnnnnnnnnnnnnnnnnnnnnnnnnnnnnnnnnnnnnnnnnnnnnnnnnnnnnnnnnnnnnnnnnnnnnnnnnnnnnnnnnnnnnnnnnnnnnnnnnnnnnnnnnnnnnnnnnnnnnnnnnnnnnnnnnnnnnnnnnnnnnnnnnnnnnnnnnnnnnnnnnnnnnnnnnnnnnnnnnnnnnnnnnnnnnnnnnnnnnnnnnnnnnnnnnnnnnnnnnnnnnnnnnnnnnnnnnnnnnnnnnnnnnnnnnnnnnnnnnnnnnnnnnnnnnnnnnnnnnnnnnnnnnnnnnnnnnnnnnnnnnnnnnnnnnnnnnnnnnnnnnnnnnnnnnnnnnnnnnnnnnnnnnnnnnnnnnnnnnnnnnnnnnnnnnnnnnnnnnnnnnnnnnnnnnnnnnnnnnnnnnnnnnnnnnnnnnnnnnnnnnnnnnnnnnnnnnnnnnnnnnnnnnnnnnnnnnnnnnnnnnnnnnnnnnnnnnnnnnnnnnnnnnnnnnnnnnnnnnnnnnnnnnnnnnnnnnnnnnnnnnnnnnnnnnnnnnnnnnnnnnnnnnnnnnnnnnnnnnnnnnnnnnnnnnnnnnnnnnnnnnnnnnnnnnnnnnnnnnnnnnnnnnnnnnnnnnnnnnnnnnnnnnnnnnnnnnnnnnnnnnnnnnnnnnnnnnnnnnnnnnnnnnnnnnnnnnnnnnnnnnnnnnnnnnnnnnnnnnnnnnnnnnnnnnnnnnnnnnnnnnnnnnnnnnnnnnnnnnnnnnnnnnnnnnnnnnnnnnnnnnnnnnnnnnnnnnnnnnnnnnnnnnnnnnnnnnnnnnnnnnnnnnnnnnnnnnnnnnnnnnnnnnnnnnnnnnnnnnnnnnnnnnnnnnnnnnnnnnnnnnnnnnnnnnnnnnnnnnnnnnnnnnnnnnnnnnnnnnnnnnnnnnnnnnnnnnnnnnnnnnnnnnnnnnnnnnnnnnnnnnnnnnnnnnnnnnnnnnnnnnnnnnnnnnnnnnnnnnnnnnnnnnnnnnnnnnnnnnnnnnnnnnnnnnnnnnnnnnnnnnnnnnnnnnnnnnnnnnnnnnnnnnnnnnnnnnnnnnnnnnnnnnnnnnnnnnnnnnnnnnnnnnnnnnnnnnnnnnnnnnnnnnnnnnnnnnnnnnnnnnnnnnnnnnnnnnnnnnnnnnnnnnnnnnnnnnnnnnnnnnnnnnnnnnnnnnnnnnnnnnnnnnnnnnnnnnnnnnnnnnnnnnnnnnnnnnnnnnnnnnnnnnnnnnnnnnnnnnnnnnnnnnnnnnnnnnnnnnnnnnnnnnnnnnnnnnnnnnnnnnnnnnnnnnnnnnnnnnnnnnnnnnnnnnnnnnnnnnnnnnnnnnnnnnnnnnnnnnnnnnnnnnnnnnnnnnnnnnnnnnnnnnnnnnnnnnnnnnnnnnnnnnnnnnnnnnnnnnnnnnnnnnnnnnnnnnnnnnnnnnnnnnnnnnnnnnnnnnnnnnnnnnnnnnnnnnnnnnnnnnnnnnnnnnnnnnnnnnnnnnnnnnnnnnnnnnnnnnnnnnnnnnnnnnnnnnnnnnnnnnnnnnnnnnnnnnnnnnnnnnnnnnnnnnnnnnnnnnnnnnnnnnnnnnnnnnnnnnnnnnnnnnnnnnnnnnnnnnnnnnnnnnnnnnnnnnnnnnnnnnnnnnnnnnnnnnnnnnnnnnnnnnnnnnnnnnnnnnnnnnnnnnnnnnnnnnnnnnnnnnnnnnnnnnnnnnnnnnnnnnnnnnnnnnnnnnnnnnnnnnnnnnnnnnnnnnnnnnnnnnnnnnnnnnnnnnnnnnnnnnnnnnnnnnnnnnnnnnnnnnnnnnnnnnnnnnnnnnnnnnnnnnnnnnnnnnnnnnnnnnnnnnnnnnnnnnnnnnnnnnnnnnnnnnnnnnnnnnnnnnnnnnnnnnnnnnnnnnnnnnnnnnnnnnnnnnnnnnnnnnnnnnnnnnnnnnnnnnnnnnnnnnnnnnnnnnnnnnnnnnnnnnnnnnnnnnnnnnnnnnnnnnnnnnnnnnnnnnnnnnnnnnnnnnnnnnnnnnnnnnnnnnnnnnnnnnnnnnnnnnnnnnnnnnnnnnnnnnnnnnnnnnnnnnnnnnnnnnnnnnnnnnnnnnnnnnnnnnnnnnnnnnnnnnnnnnnnnnnnnnnnnnnnnnnnnnnnnnnnnnnnnnnnnnnnnnnnnnnnnnnnnnnnnnnnnnnnnnnnnnnnnnnnnnnnnnnnnnnnnnnnnnnnnnnnnnnnnnnnnnnnnnnnnnnnnnnnnnnnnnnnnnnnnnnnnnnnnnnnnnnnnnnnnnnnnnnnnnnnnnnnnnnnnnnnnnnnnnnnnnnnnnnnnnnnnnnnnnnnnnnnnnnnnnnnnnnnnnnnnnnnnnnnnnnnnnnnnnnnnnnnnnnnnnnnnnnnnnnnnnnnnnnnnnnnnnnnnnnnnnnnnnnnnnnnnnnnnnnnnnnnnnnnnnnnnnnnnnnnnnnnnnnnnnnnnnnnnnnnnnnnnnnnnnnnnnnnnnnnnnnnnnnnnnnnnnnnnnnnnnnnnnnnnnnnnnnnnnnnnnnnnnnnnnnnnnnnnnnnnnnnnnnnnnnnnnnnnnnnnnnnnnnnnnnnnnnnnnnnnnnnnnnnnnnnnnnnnnnnnnnnnnnnnnnnnnnnnnnnnnnnnnnnnnnnnnnnnnnnnnnnnnnnnnnnnnnnnnnnnnnnnnnnnnnnnnnnnnnnnnnnnnnnnnnnnnnnnnnnnnnnnnnnnnnnnnnnnnnnnnnnnnnnnnnnnnnnnnnnnnnnnnnnnnnnnnnnnnnnnnnnnnnnnnnnnnnnnnnnnnnnnnnnnnnnnnnnnnnnnnnnnnnnnnnnnnnnnnnnnnnnnnnnnnnnnnnnnnnnnnnnnnnnnnnnnnnnnnnnnnnnnnnnnnnnnnnnnnnnnnnnnnnnnnnnnnnnnnnnnnnnnnnnnnnnnnnnnnnnnnnnnnnnnnnnnnnnnnnnnnnnnnnnnnnnnnnnnnnnnnnnnnnnnnnnnnnnnnnnnnnnnnnnnnnnnnnnnnnnnnnnnnnnnnnnnnnnnnnnnnnnnnnnnnnnnnnnnnnnnnnnnnnnnnnnnnnnnnnnnnnnnnnnnnnnnnnnnnnnnnnnnnnnnnnnnnnnnnnnnnnnnnnnnnnnnnnnnnnnnnnnnnnnnnnnnnnnnnnnnnnnnnnnnnnnnnnnnnnnnnnnnnnnnnnnnnnnnnnnnnnnnnnnnnnnnnnnnnnnnnnnnnnnnnnnnnnnnnnnnnnnnnnnnnnnnnnnnnnnnnnnnnnnnnnnnnnnnnnnnnnnnnnnnnnnnnnnnnnnnnnnnnnnnnnnnnnnnnnnnnnnnnnnnnnnnnnnnnnnnnnnnnnnnnnnnnnnnnnnnnnnnnnnnnnnnnnnnnnnnnnnnnnnnnnnnnnnnnnnnnnnnnnnnnnnnnnnnnnnnnnnnnnnnnnnnnnnnnnnnnnnnnnnnnnnnnnnnnnnnnnnnnnnnnnnnnnnnnnnnnnnnnnnnnnnnnnnnnnnnnnnnnnnnnnnnnnnnnnnnnnnnnnnnnnnnnnnnnnnnnnnnnnnnnnnnnnnnnnnnnnnnnnnnnnnnnnnnnnnnnnnnnnnnnnnnnnnnnnnnnnnnnnnnnnnnnnnnnnnnnnnnnnnnnnnnnnnnnnnnnnnnnnnnnnnnnnnnnnnnnnnnnnnnnnnnnnnnnnnnnnnnnnnnnnnnnnnnnnnnnnnnnnnnnnnnnnnnnnnnnnnnnnnnnnnnnnnnnnnnnnnnnnnnnnnnnnnnnnnnnnnnnnnnnnnnnnnnnnnnnnnnnnnnnnnnnnnnnnnnnnnnnnnnnnnnnnnnnnnnnnnnnnnnnnnnnnnnnnnnnnnnnnnnnnnnnnnnnnnnnnnnnnnnnnnnnnnnnnnnnnnnnnnnnnnnnnnnnnnnnnnnnnnnnnnnnnnnnnnnnnnnnnnnnnnnnnnnnnnnnnnnnnnnnnnnnnnnnnnnnnnnnnnnnnnnnnnnnnnnnnnnnnnnnnnnnnnnnnnnnnnnnnnnnnnnnnnnnnnnnnnnnnnnnnnnnnnnnnnnnnnnnnnnnnnnnnnnnnnnnnnnnnnnnnnnnnnnnnnnnnnnnnnnnnnnnnnnnnnnnnnnnnnnnnnnnnnnnnnnnnnnnnnnnnnnnnnnnnnnnnnnnnnnnnnnnnnnnnnnnnnnnnnnnnnnnnnnnnnnnnnnnnnnnnnnnnnnnnnnnnnnnnnnnnnnnnnnnnnnnnnnnnnnnnnnnnnnnnnnnnnnnnnnnnnnnnnnnnnnnnnnnnnnnnnnnnnnnnnnnnnnnnnnnnnnnnnnnnnnnnnnnnnnnnnnnnnnnnnnnnnnnnnnnnnnnnnnnnnnnnnnnnnnnnnnnnnnnnnnnnnnnnnnnnnnnnnnnnnnnnnnnnnnnnnnnnnnnnnnnnnnnnnnnnnnnnnnnnnnnnnnnnnnnnnnnnnnnnnnnnnnnnnnnnnnnnnnnnnnnnnnnnnnnnnnnnnnnnnnnnnnnnnnnnnnnnnnnnnnnnnnnnnnnnnnnnnnnnnnnnnnnnnnnnnnnnnnnnnnnnnnnnnnnnnnnnnnnnnnnnnnnnnnnnnnnnnnnnnnnnnnnnnnnnnnnnnnnnnnnnnnnnnnnnnnnnnnnnnnnnnnnnnnnnnnnnnnnnnnnnnnnnnnnnnnnnnnnnnnnnnnnnnnnnnnnnnnnnnnnnnnnnnnnnnnnnnnnnnnnnnnnnnnnnnnnnnnnnnnnnnnnnnnnnnnnnnnnnnnnnnnnnnnnnnnnnnnnnnnnnnnnnnnnnnnnnnnnnnnnnnnnnnnnnnnnnnnnnnnnnnnnnnnnnnnnnnnnnnnnnnnnnnnnnnnnnnnnnnnnnnnnnnnnnnnnnnnnnnnnnnnnnnnnnnnnnnnnnnnnnnnnnnnnnnnnnnnnnnnnnnnnnnnnnnnnnnnnnnnnnnnnnnnnnnnnnnnnnnnnnnnnnnnnnnnnnnnnnnnnnnnnnnnnnnnnnnnnnnnnnnnnnnnnnnnnnnnnnnnnnnnnnnnnnnnnnnnnnnnnnnnnnnnnnnnnnnnnnnnnnnnnnnnnnnnnnnnnnnnnnnnnnnnnnnnnnnnnnnnnnnnnnnnnnnnnnnnnnnnnnnnnnnnnnnnnnnnnnnnnnnnnnnnnnnnnnnnnnnnnnnnnnnnnnnnnnnnnnnnnnnnnnnnnnnnnnnnnnnnnnnnnnnnnnnnnnnnnnnnnnnnnnnnnnnnnnnnnnnnnnnnnnnnnnnnnnnnnnnnnnnnnnnnnnnnnnnnnnnnnnnnnnnnnnnnnnnnnnnnnnnnnnnnnnnnnnnnnnnnnnnnnnnnnnnnnnnnnnnnnnnnnnnnnnnnnnnnnnnnnnnnnnnnnnnnnnnnnnnnnnnnnnnnnnnnnnnnnnnnnnnnnnnnnnnnnnnnnnnnnnnnnnnnnnnnnnnnnnnnnnnnnnnnnnnnnnnnnnnnnnnnnnnnnnnnnnnnnnnnnnnnnnnnnnnnnnnnnnnnnnnnnnnnnnnnnnnnnnnnnnnnnnnnnnnnnnnnnnnnnnnnnnnnnnnnnnnnnnnnnnnnnnnnnnnnnnnnnnnnnnnnnnnnnnnnnnnnnnnnnnnnnnnnnnnnnnnnnnnnnnnnnnnnnnnnnnnnnnnnnnnnnnnnnnnnnnnnnnnnnnnnnnnnnnnnnnnnnnnnnnnnnnnnnnnnnnnnnnnnnnnnnnnnnnnnnnnnnnnnnnnnnnnnnnnnnnnnnnnnnnnnnnnnnnnnnnnnnnnnnnnnnnnnnnnnnnnnnnnnnnnnnnnnnnnnnnnnnnnnnnnnnnnnnnnnnnnnnnnnnnnnnnnnnnnnnnnnnnnnnnnnnnnnnnnnnnnnnnnnnnnnnnnnnnnnnnnnnnnnnnnnnnnnnnnnnnnnnnnnnnnnnnnnnnnnnnnnnnnnnnnnnnnnnnnnnnnnnnnnnnnnnnnnnnnnnnnnnnnnnnnnnnnnnnnnnnnnnnnnnnnnnnnnnnnnnnnnnnnnnnnnnnnnnnnnnnnnnnnnnnnnnnnnnnnnnnnnnnnnnnnnnnnnnnnnnnnnnnnnnnnnnnnnnnnnnnnnnnnnnnnnnnnnnnnnnnnnnnnnnnnnnnnnnnnnnnnnnnnnnnnnnnnnnnnnnnnnnnnnnnnnnnnnnnnnnnnnnnnnnnnnnnnnnnnnnnnnnnnnnnnnnnnnnnnnnnnnnnnnnnnnnnnnnnnnnnnnnnnnnnnnnnnnnnnnnnnnnnnnnnnnnnnnnnnnnnnnnnnnnnnnnnnnnnnnnnnnnnnnnnnnnnnnnnnnnnnnnnnnnnnnnnnnnnnnnnnnnnnnnnnnnnnnnnnnnnnnnnnnnnnnnnnnnnnnnnnnnnnnnnnnnnnnnnnnnnnnnnnnnnnnnnnnnnnnnnnnnnnnnnnnnnnnnnnnnnnnnnnnnnnnnnnnnnnnnnnnnnnnnnnnnnnnnnnnnnnnnnnnnnnnnnnnnnnnnnnnnnnnnnnnnnnnnnnnnnnnnnnnnnnnnnnnnnnnnnnnnnnnnnnnnnnnnnnnnnnnnnnnnnnnnnnnnnnnnnnnnnnnnnnnnnnnnnnnnnnnnnnnnnnnnnnnnnnnnnnnnnnnnnnnnnnnnnnnnnnnnnnnnnnnnnnnnnnnnnnnnnnnnnnnnnnnnnnnnnnnnnnnnnnnnnnnnnnnnnnnnnnnnnnnnnnnnnnnnnnnnnnnnnnnnnnnnnnnnnnnnnnnnnnnnnnnnnnnnnnnnnnnnnnnnnnnnnnnnnnnnnnnnnnnnnnnnnnnnnnnnnnnnnnnnnnnnnnnnnnnnnnnnnnnnnnnnnnnnnnnnnnnnnnnnnnnnnnnnnnnnnnnnnnnnnnnnnnnnnnnnnnnnnnnnnnnnnnnnnnnnnnnnnnnnnnnnnnnnnnnnnnnnnnnnnnnnnnnnnnnnnnnnnnnnnnnnnnnnnnnnnnnnnnnnnnnnnnnnnnnnnnnnnnnnnnnnnnnnnnnnnnnnnnnnnnnnnnnnnnnnnnnnnnnnnnnnnnnnnnnnnnnnnnnnnnnnnnnnnnnnnnnnnnnnnnnnnnnnnnnnnnnnnnnnnnnnnnnnnnnnnnnnnnnnnnnnnnnnnnnnnnnnnnnnnnnnnnnnnnnnnnnnnnnnnnnnnnnnnnnnnnnnnnnnnnnnnnnnnnnnnnnnnnnnnnnnnnnnnnnnnnnnnnnnnnnnnnnnnnnnnnnnnnnnnnnnnnnnnnnnnnnnnnnnnnnnnnnnnnnnnnnnnnnnnnnnnnnnnnnnnnnnnnnnnnnnnnnnnnnnnnnnnnnnnnnnnnnnnnnnnnnnnnnnnnnnnnnnnnnnnnnnnnnnnnnnnnnnnnnnnnnnnnnnnnnnnnnnnnnnnnnnnnnnnnnnnnnnnnnnnnnnnnnnnnnnnnnnnnnnnnnnnnnnnnnnnnnnnnnnnnnnnnnnnnnnnnnnnnnnnnnnnnnnnnnnnnnnnnnnnnnnnnnnnnnnnnnnnnnnnnnnnnnnnnnnnnnnnnnnnnnnnnnnnnnnnnnnnnnnnnnnnnnnnnnnnnnnnnnnnnnnnnnnnnnnnnnnnnnnnnnnnnnnnnnnnnnnnnnnnnnnnnnnnnnnnnnnnnnnnnnnnnnnnnnnnnnnnnnnnnnnnnnnnnnnnnnnnnnnnnnnnnnnnnnnnnnnnnnnnnnnnnnnnnnnnnnnnnnnnnnnnnnnnnnnnnnnnnnnnnnnnnnnnnnnnnnnnnnnnnnnnnnnnnnnnnnnnnnnnnnnnnnnnnnnnnnnnnnnnnnnnnnnnnnnnnnnnnnnnnnnnnnnnnnnnnnnnnnnnnnnnnnnnnnnnnnnnnnnnnnnnnnnnnnnnnnnnnnnnnnnnnnnnnnnnnnnnnnnnnnnnnnnnnnnnnnnnnnnnnnnnnnnnnnnnnnnnnnnnnnnnnnnnnnnnnnnnnnnnnnnnnnnnnnnnnnnnnnnnnnnnnnnnnnnnnnnnnnnnnnnnnnnnnnnnnnnnnnnnnnnnnnnnnnnnnnnnnnnnnnnnnnnnnnnnnnnnnnnnnnnnnnnnnnnnnnnnnnnnnnnnnnnnnnnnnnnnnnnnnnnnnnnnnnnnnnnnnnnnnnnnnnnnnnnnnnnnnnnnnnnnnnnnnnnnnnnnnnnnnnnnnnnnnnnnnnnnnnnnnnnnnnnnnnnnnnnnnnnnnnnnnnnnnnnnnnnnnnnnnnnnnnnnnnnnnnnnnnnnnnnnnnnnnnnnnnnnnnnnnnnnnnnnnnnnnnnnnnnnnnnnnnnnnnnnnnnnnnnnnnnnnnnnnnnnnnnnnnnnnnnnnnnnnnnnnnnnnnnnnnnnnnnnnnnnnnnnnnnnnnnnnnnnnnnnnnnnnnnnnnnnnnnnnnnnnnnnnnnnnnnnnnnnnnnnnnnnnnnnnnnnnnnnnnnnnnnnnnnnnnnnnnnnnnnnnnnnnnnnnnnnnnnnnnnnnnnnnnnnnnnnnnnnnnnnnnnnnnnnnnnnnnnnnnnnnnnnnnnnnnnnnnnnnnnnnnnnnnnnnnnnnnnnnnnnnnnnnnnnnnnnnnnnnnnnnnnnnnnnnnnnnnnnnnnnnnnnnnnnnnnnnnnnnnnnnnnnnnnnnnnnnnnnnnnnnnnnnnnnnnnnnnnnnnnnnnnnnnnnnnnnnnnnnnnnnnnnnnnnnnnnnnnnnnnnnnnnnnnnnnnnnnnnnnnnnnnnnnnnnnnnnnnnnnnnnnnnnnnnnnnnnnnnnnnnnnnnnnnnnnnnnnnnnnnnnnnnnnnnnnnnnnnnnnnnnnnnnnnnnnnnnnnnnnnnnnnnnnnnnnnnnnnnnnnnnnnnnnnnnnnnnnnnnnnnnnnnnnnnnnnnnnnnnnnnnnnnnnnnnnnnnnnnnnnnnnnnnnnnnnnnnnnnnnnnnnnnnnnnnnnnnnnnnnnnnnnnnnnnnnnnnnnnnnnnnnnnnnnnnnnnnnnnnnnnnnnnnnnnnnnnnnnnnnnnnnnnnnnnnnnnnnnnnnnnnnnnnnnnnnnnnnnnnnnnnnnnnnnnnnnnnnnnnnnnnnnnnnnnnnnnnnnnnnnnnnnnnnnnnnnnnnnnnnnnnnnnnnnnnnnnnnnnnnnnnnnnnnnnnnnnnnnnnnnnnnnnnnnnnnnnnnnnnnnnnnnnnnnnnnnnnnnnnnnnnnnnnnnnnnnnnnnnnnnnnnnnnnnnnnnnnnnnnnnnnnnnnnnnnnnnnnnnnnnnnnnnnnnnnnnnnnnnnnnnnnnnnnnnnnnnnnnnnnnnnnnnnnnnnnnnnnnnnnnnnnnnnnnnnnnnnnnnnnnnnnnnnnnnnnnnnnnnnnnnnnnnnnnnnnnnnnnnnnnnnnnnnnnnnnnnnnnnnnnnnnnnnnnnnnnnnnnnnnnnnnnnnnnnnnnnnnnnnnnnnnnnnnnnnnnnnnnnnnnnnnnnnnnnnnnnnnnnnnnnnnnnnnnnnnnnnnnnnnnnnnnnnnnnnnnnnnnnnnnnnnnnnnnnnnnnnnnnnnnnnnnnnnnnnnnnnnnnnnnnnnnnnnnnnnnnnnnnnnnnnnnnnnnnnnnnnnnnnnnnnnnnnnnnnnnnnnnnnnnnnnnnnnnnnnnnnnnnnnnnnnnnnnnnnnnnnnnnnnnnnnnnnnnnnnnnnnnnnnnnnnnnnnnnnnnnnnnnnnnnnnnnnnnnnnnnnnnnnnnnnnnnnnnnnnnnnnnnnnnnnnnnnnnnnnnnnnnnnnnnnnnnnnnnnnnnnnnnnnnnnnnnnnnnnnnnnnnnnnnnnnnnnnnnnnnnnnnnnnnnnnnnnnnnnnnnnnnnnnnnnnnnnnnnnnnnnnnnnnnnnnnnnnnnnnnnnnnnnnnnnnnnnnnnnnnnnnnnnnnnnnnnnnnnnnnnnnnnnnnnnnnnnnnnnnnnnnnnnnnnnnnnnnnnnnnnnnnnnnnnnnnnnnnnnnnnnnnnnnnnnnnnnnnnnnnnnnnnnnnnnnnnnnnnnnnnnnnnnnnnnnnnnnnnnnnnnnnnnnnnnnnnnnnnnnnnnnnnnnnnnnnnnnnnnnnnnnnnnnnnnnnnnnnnnnnnnnnnnnnnnnnnnnnnnnnnnnnnnnnnnnnnnnnnnnnnnnnnnnnnnnnnnnnnnnnnnnnnnnnnnnnnnnnnnnnnnnnnnnnnnnnnnnnnnnnnnnnnnnnnnnnnnnnnnnnnnnnnnnnnnnnnnnnnnnnnnnnnnnnnnnnnnnnnnnnnnnnnnnnnnnnnnnnnnnnnnnnnnnnnnnnnnnnnnnnnnnnnnnnnnnnnnnnnnnnnnnnnnnnnnnnnnnnnnnnnnnnnnnnnnnnnnnnnnnnnnnnnnnnnnnnnnnnnnnnnnnnnnnnnnnnnnnnnnnnnnnnnnnnnnnnnnnnnnnnnnnnnnnnnnnnnnnnnnnnnnnnnnnnnnnnnnnnnnnnnnnnnnnnnnnnnnnnnnnnnnnnnnnnnnnnnnnnnnnnnnnnnnnnnnnnnnnnnnnnnnnnnnnnnnnnnnnnnnnnnnnnnnnnnnnnnnnnnnnnnnnnnnnnnnnnnnnnnnnnnnnnnnnnnnnnnnnnnnnnnnnnnnnnnnnnnnnnnnnnnnnnnnnnnnnnnnnnnnnnnnnnnnnnnnnnnnnnnnnnnnnnnnnnnnnnnnnnnnnnnnnnnnnnnnnnnnnnnnnnnnnnnnnnnnnnnnnnnnnnnnnnnnnnnnnnnnnnnnnnnnnnnnnnnnnnnnnnnnnnnnnnnnnnnnnnnnnnnnnnnnnnnnnnnnnnnnnnnnnnnnnnnnnnnnnnnnnnnnnnnnnnnnnnnnnnnnnnnnnnnnnnnnnnnnnnnnnnnnnnnnnnnnnnnnnnnnnnnnnnnnnnnnnnnnnnnnnnnnnnnnnnnnnnnnnnnnnnnnnnnnnnnnnnnnnnnnnnnnnnnnnnnnnnnnnnnnnnnnnnnnnnnnnnnnnnnnnnnnnnnnnnnnnnnnnnnnnnnnnnnnnnnnnnnnnnnnnnnnnnnnnnnnnnnnnnnnnnnnnnnnnnnnnnnnnnnnnnnnnnnnnnnnnnnnnnnnnnnnnnnnnnnnnnnnnnnnnnnnnnnnnnnnnnnnnnnnnnnnnnnnnnnnnnnnnnnnnnnnnnnnnnnnnnnnnnnnnnnnnnnnnnnnnnnnnnnnnnnnnnnnnnnnnnnnnnnnnnnnnnnnnnnnnnnnnnnnnnnnnnnnnnnnnnnnnnnnnnnnnnnnnnnnnnnnnnnnnnnnnnnnnnnnnnnnnnnnnnnnnnnnnnnnnnnnnnnnnnnnnnnnnnnnnnnnnnnnnnnnnnnnnnnnnnnnnnnnnnnnnnnnnnnnnnnnnnnnnnnnnnnnnnnnnnnnnnnnnnnnnnnnnnnnnnnnnnnnnnnnnnnnnnnnnnnnnnnnnnnnnnnnnnnnnnnnnnnnnnnnnnnnnnnnnnnnnnnnnnnnnnnnnnnnnnnnnnnnnnnnnnnnnnnnnnnnnnnnnnnnnnnnnnnnnnnnnnnnnnnnnnnnnnnnnnnnnnnnnnnnnnnnnnnnnnnnnnnnnnnnnnnnnnnnnnnnnnnnnnnnnnnnnnnnnnnnnnnnnnnnnnnnnnnnnnnnnnnnnnnnnnnnnnnnnnnnnnnnnnnnnnnnnnnnnnnnnnnnnnnnnnnnnnnnnnnnnnnnnnnnnnnnnnnnnnnnnnnnnnnnnnnnnnnnnnnnnnnnnnnnnnnnnnnnnnnnnnnnnnnnnnnnnnnnnnnnnnnnnnnnnnnnnnnnnnnnnnnnnnnnnnnnnnnnnnnnnnnnnnnnnnnnnnnnnnnnnnnnnnnnnnnnnnnnnnnnnnnnnnnnnnnnnnnnnnnnnnnnnnnnnnnnnnnnnnnnnnnnnnnnnnnnnnnnnnnnnnnnnnnnnnnnnnnnnnnnnnnnnnnnnnnnnnnnnnnnnnnnnnnnnnnnnnnnnnnnnnnnnnnnnnnnnnnnnnnnnnnnnnnnnnnnnnnnnnnnnnnnnnnnnnnnnnnnnnnnnnnnnnnnnnnnnnnnnnnnnnnnnnnnnnnnnnnnnnnnnnnnnnnnnnnnnnnnnnnnnnnnnnnnnnnnnnnnnnnnnnnnnnnnnnnnnnnnnnnnnnnnnnnnnnnnnnnnnnnnnnnnnnnnnnnnnnnnnnnnnnnnnnnnnnnnnnnnnnnnnnnnnnnnnnnnnnnnnnnnnnnnnnnnnnnnnnnnnnnnnnnnnnnnnnnnnnnnnnnnnnnnnnnnnnnnnnnnnnnnnnnnnnnnnnnnnnnnnnnnnnnnnnnnnnnnnnnnnnnnnnnnnnnnnnnnnnnnnnnnnnnnnnnnnnnnnnnnnnnnnnnnnnnnnnnnnnnnnnnnnnnnnnnnnnnnnnnnnnnnnnnnnnnnnnnnnnnnnnnnnnnnnnnnnnnnnnnnnnnnnnnnnnnnnnnnnnnnnnnnnnnnnnnnnnnnnnnnnnnnnnnnnnnnnnnnnnnnnnnnnnnnnnnnnnnnnnnnnnnnnnnnnnnnnnnnnnnnnnnnnnnnnnnnnnnnnnnnnnnnnnnnnnnnnnnnnnnnnnnnnnnnnnnnnnnnnnnnnnnnnnnnnnnnnnnnnnnnnnnnnnnnnnnnnnnnnnnnnnnnnnnnnnnnnnnnnnnnnnnnnnnnnnnnnnnnnnnnnnnnnnnnnnnnnnnnnnnnnnnnnnnnnnnnnnnnnnnnnnnnnnnnnnnnnnnnnnnnnnnnnnnnnnnnnnnnnnnnnnnnnnnnnnnnnnnnnnnnnnnnnnnnnnnnnnnnnnnnnnnnnnnnnnnnnnnnnnnnnnnnnnnnnnnnnnnnnnnnnnnnnnnnnnnnnnnnnnnnnnnnnnnnnnnnnnnnnnnnnnnnnnnnnnnnnnnnnnnnnnnnnnnnnnnnnnnnnnnnnnnnnnnnnnnnnnnnnnnnnnnnnnnnnnnnnnnnnnnnnnnnnnnnnnnnnnnnnnnnnnnnnnnnnnnnnnnnnnnnnnnnnnnnnnnnnnnnnnnnnnnnnnnnnnnnnnnnnnnnnnnnnnnnnnnnnnnnnnnnnnnnnnnnnnnnnnnnnnnnnnnnnnnnnnnnnnnnnnnnnnnnnnnnnnnnnnnnnnnnnnnnnnnnnnnnnnnnnnnnnnnnnnnnnnnnnnnnnnnnnnnnnnnnnnnnnnnnnnnnnnnnnnnnnnnnnnnnnnnnnnnnnnnnnnnnnnnnnnnnnnnnnnnnnnnnnnnnnnnnnnnnnnnnnnnnnnnnnnnnnnnnnnnnnnnnnnnnnnnnnnnnnnnnnnnnnnnnnnnnnnnnnnnnnnnnnnnnnnnnnnnnnnnnnnnnnnnnnnnnnnnnnnnnnnnnnnnnnnnnnnnnnnnnnnnnnnnnnnnnnnnnnnnnnnnnnnnnnnnnnnnnnnnnnnnnnnnnnnnnnnnnnnnnnnnnnnnnnnnnnnnnnnnnnnnnnnnnnnnnnnnnnnnnnnnnnnnnnnnnnnnnnnnnnnnnnnnnnnnnnnnnnnnnnnnnnnnnnnnnnnnnnnnnnnnnnnnnnnnnnnnnnnnnnnnnnnnnnnnnnnnnnnnnnnnnnnnnnnnnnnnnnnnnnnnnnnnnnnnnnnnnnnnnnnnnnnnnnnnnnnnnnnnnnnnnnnnnnnnnnnnnnnnnnnnnnnnnnnnnnnnnnnnnnnnnnnnnnnnnnnnnnnnnnnnnnnnnnnnnnnnnnnnnnnnnnnnnnnnnnnnnnnnnnnnnnnnnnnnnnnnnnnnnnnnnnnnnnnnnnnnnnnnnnnnnnnnnnnnnnnnnnnnnnnnnnnnnnnnnnnnnnnnnnnnnnnnnnnnnnnnnnnnnnnnnnnnnnnnnnnnnnnnnnnnnnnnnnnnnnnnnnnnnnnnnnnnnnnnnnnnnnnnnnnnnnnnnnnnnnnnnnnnnnnnnnnnnnnnnnnnnnnnnnnnnnnnnnnnnnnnnnnnnnnnnnnnnnnnnnnnnnnnnnnnnnnnnnnnnnnnnnnnnnnnnnnnnnnnnnnnnnnnnnnnnnnnnnnnnnnnnnnnnnnnnnnnnnnnnnnnnnnnnnnnnnnnnnnnnnnnnnnnnnnnnnnnnnnnnnnnnnnnnnnnnnnnnnnnnnnnnnnnnnnnnnnnnnnnnnnnnnnnnnnnnnnnnnnnnnnnnnnnnnnnnnnnnnnnnnnnnnnnnnnnnnnnnnnnnnnnnnnnnnnnnnnnnnnnnnnnnnnnnnnnnnnnnnnnnnnnnnnnnnnnnnnnnnnnnnnnnnnnnnnnnnnnnnnnnnnnnnnnnnnnnnnnnnnnnnnnnnnnnnnnnnnnnnnnnnnnnnnnnnnnnnnnnnnnnnnnnnnnnnnnnnnnnnnnnnnnnnnnnnnnnnnnnnnnnnnnnnnnnnnnnnnnnnnnnnnnnnnnnnnnnnnnnnnnnnnnnnnnnnnnnnnnnnnnnnnnnnnnnnnnnnnnnnnnnnnnnnnnnnnnnnnnnnnnnnnnnnnnnnnnnnnnnnnnnnnnnnnnnnnnnnnnnnnnnnnnnnnnnnnnnnnnnnnnnnnnnnnnnnnnnnnnnnnnnnnnnnnnnnnnnnnnnnnnnnnnnnnnnnnnnnnnnnnnnnnnnnnnnnnnnnnnnnnnnnnnnnnnnnnnnnnnnnnnnnnnnnnnnnnnnnnnnnnnnnnnnnnnnnnnnnnnnnnnnnnnnnnnnnnnnnnnnnnnnnnnnnnnnnnnnnnnnnnnnnnnnnnnnnnnnnnnnnnnnnnnnnnnnnnnnnnnnnnnnnnnnnnnnnnnnnnnnnnnnnnnnnnnnnnnnnnnnnnnnnnnnnnnnnnnnnnnnnnnnnnnnnnnnnnnnnnnnnnnnnnnnnnnnnnnnnnnnnnnnnnnnnnnnnnnnnnnnnnnnnnnnnnnnnnnnnnnnnnnnnnnnnnnnnnnnnnnnnnnnnnnnnnnnnnnnnnnnnnnnnnnnnnnnnnnnnnnnnnnnnnnnnnnnnnnnnnnnnnnnnnnnnnnnnnnnnnnnnnnnnnnnnnnnnnnnnnnnnnnnnnnnnnnnnnnnnnnnnnnnnnnnnnnnnnnnnnnnnnnnnnnnnnnnnnnnnnnnnnnnnnnnnnnnnnnnnnnnnnnnnnnnnnnnnnnnnnnnnnnnnnnnnnnnnnnnnnnnnnnnnnnnnnnnnnnnnnnnnnnnnnnnnnnnnnnnnnnnnnnnnnnnnnnnnnnnnnnnnnnnnnnnnnnnnnnnnnnnnnnnnnnnnnnnnnnnnnnnnnnnnnnnnnnnnnnnnnnnnnnnnnnnnnnnnnnnnnnnnnnnnnnnnnnnnnnnnnnnnnnnnnnnnnnnnnnnnnnnnnnnnnnnnnnnnnnnnnnnnnnnnnnnnnnnnnnnnnnnnnnnnnnnnnnnnnnnnnnnnnnnnnnnnnnnnnnnnnnnnnnnnnnnnnnnnnnnnnnnnnnnnnnnnnnnnnnnnnnnnnnnnnnnnnnnnnnnnnnnnnnnnnnnnnnnnnnnnnnnnnnnnnnnnnnnnnnnnnnnnnnnnnnnnnnnnnnnnnnnnnnnnnnnnnnnnnnnnnnnnnnnnnnnnnnnnnnnnnnnnnnnnnnnnnnnnnnnnnnnnnnnnnnnnnnnnnnnnnnnnnnnnnnnnnnnnnnnnnnnnnnnnnnnnnnnnnnnnnnnnnnnnnnnnnnnnnnnnnnnnnnnnnnnnnnnnnnnnnnnnnnnnnnnnnnnnnnnnnnnnnnnnnnnnnnnnnnnnnnnnnnnnnnnnnnnnnnnnnnnnnnnnnnnnnnnnnnnnnnnnnnnnnnnnnnnnnnnnnnnnnnnnnnnnnnnnnnnnnnnnnnnnnnnnnnnnnnnnnnnnnnnnnnnnnnnnnnnnnnnnnnnnnnnnnnnnnnnnnnnnnnnnnnnnnnnnnnnnnnnnnnnnnnnnnnnnnnnnnnnnnnnnnnnnnnnnnnnnnnnnnnnnnnnnnnnnnnnnnnnnnnnnnnnnnnnnnnnnnnnnnnnnnnnnnnnnnnnnnnnnnnnnnnnnnnnnnnnnnnnnnnnnnnnnnnnnnnnnnnnnnnnnnnnnnnnnnnnnnnnnnnnnnnnnnnnnnnnnnnnnnnnnnnnnnnnnnnnnnnnnnnnnnnnnnnnnnnnnnnnnnnnnnnnnnnnnnnnnnnnnnnnnnnnnnnnnnnnnnnnnnnnnnnnnnnnnnnnnnnnnnnnnnnnnnnnnnnnnnnnnnnnnnnnnnnnnnnnnnnnnnnnnnnnnnnnnnnnnnnnnnnnnnnnnnnnnnnnnnnnnnnnnnnnnnnnnnnnnnnnnnnnnnnnnnnnnnnnnnnnnnnnnnnnnnnnnnnnnnnnnnnnnnnnnnnnnnnnnnnnnnnnnnnnnnnnnnnnnnnnnnnnnnnnnnnnnnnnnnnnnnnnnnnnnnnnnnnnnnnnnnnnnnnnnnnnnnnnnnnnnnnnnnnnnnnnnnnnnnnnnnnnnnnnnnnnnnnnnnnnnnnnnnnnnnnnnnnnnnnnnnnnnnnnnnnnnnnnnnnnnnnnnnnnnnnnnnnnnnnnnnnnnnnnnnnnnnnnnnnnnnnnnnnnnnnnnnnnnnnnnnnnnnnnnnnnnnnnnnnnnnnnnnnnnnnnnnnnnnnnnnnnnnnnnnnnnnnnnnnnnnnnnnnnnnnnnnnnnnnnnnnnnnnnnnnnnnnnnnnnnnnnnnnnnnnnnnnnnnnnnnnnnnnnnnnnnnnnnnnnnnnnnnnnnnnnnnnnnnnnnnnnnnnnnnnnnnnnnnnnnnnnnnnnnnnnnnnnnnnnnnnnnnnnnnnnnnnnnnnnnnnnnnnnnnnnnnnnnnnnnnnnnnnnnnnnnnnnnnnnnnnnnnnnnnnnnnnnnnnnnnnnnnnnnnnnnnnnnnnnnnnnnnnnnnnnnnnnnnnnnnnnnnnnnnnnnnnnnnnnnnnnnnnnnnnnnnnnnnnnnnnnnnnnnnnnnnnnnnnnnnnnnnnnnnnnnnnnnnnnnnnnnnnnnnnnnnnnnnnnnnnnnnnnnnnnnnnnnnnnnnnnnnnnnnnnnnnnnnnnnnnnnnnnnnnnnnnnnnnnnnnnnnnnnnnnnnnnnnnnnnnnnnnnnnnnnnnnnnnnnnnnnnnnnnnnnnnnnnnnnnnnnnnnnnnnnnnnnnnnnnnnnnnnnnnnnnnnnnnnnnnnnnnnnnnnnnnnnnnnnnnnnnnnnnnnnnnnnnnnnnnnnnnnnnnnnnnnnnnnnnnnnnnnnnnnnnnnnnnnnnnnnnnnnnnnnnnnnnnnnnnnnnnnnnnnnnnnnnnnnnnnnnnnnnnnnnnnnnnnnnnnnnnnnnnnnnnnnnnnnnnnnnnnnnnnnnnnnnnnnnnnnnnnnnnnnnnnnnnnnnnnnnnnnnnnnnnnnnnnnnnnnnnnnnnnnnnnnnnnnnnnnnnnnnnnnnnnnnnnnnnnnnnnnnnnnnnnnnnnnnnnnnnnnnnnnnnnnnnnnnnnnnnnnnnnnnnnnnnnnnnnnnnnnnnnnnnnnnnnnnnnnnnnnnnnnnnnnnnnnnnnnnnnnnnnnnnnnnnnnnnnnnnnnnnnnnnnnnnnnnnnnnnnnnnnnnnnnnnnnnnnnnnnnnnnnnnnnnnnnnnnnnnnnnnnnnnnnnnnnnnnnnnnnnnnnnnnnnnnnnnnnnnnnnnnnnnnnnnnnnnnnnnnnnnnnnnnnnnnnnnnnnnnnnnnnnnnnnnnnnnnnnnnnnnnnnnnnnnnnnnnnnnnnnnnnnnnnnnnnnnnnnnnnnnnnnnnnnnnnnnnnnnnnnnnnnnnnnnnnnnnnnnnnnnnnnnnnnnnnnnnnnnnnnnnnnnnnnnnnnnnnnnnnnnnnnnnnnnnnnnnnnnnnnnnnnnnnnnnnnnnnnnnnnnnnnnnnnnnnnnnnnnnnnnnnnnnnnnnnnnnnnnnnnnnnnnnnnnnnnnnnnnnnnnnnnnnnnnnnnnnnnnnnnnnnnnnnnnnnnnnnnnnnnnnnnnnnnnnnnnnnnnnnnnnnnnnnnnnnnnnnnnnnnnnnnnnnnnnnnnnnnnnnnnnnnnnnnnnnnnnnnnnnnnnnnnnnnnnnnnnnnnnnnnnnnnnnnnnnnnnnnnnnnnnnnnnnnnnnnnnnnnnnnnnnnnnnnnnnnnnnnnnnnnnnnnnnnnnnnnnnnnnnnnnnnnnnnnnnnnnnnnnnnnnnnnnnnnnnnnnnnnnnnnnnnnnnnnnnnnnnnnnnnnnnnnnnnnnnnnnnnnnnnnnnnnnnnnnnnnnnnnnnnnnnnnnnnnnnnnnnnnnnnnnnnnnnnnnnnnnnnnnnnnnnnnnnnnnnnnnnnnnnnnnnnnnnnnnnnnnnnnnnnnnnnnnnnnnnnnnnnnnnnnnnnnnnnnnnnnnnnnnnnnnnnnnnnnnnnnnnnnnnnnnnnnnnnnnnnnnnnnnnnnnnnnnnnnnnnnnnnnnnnnnnnnnnnnnnnnnnnnnnnnnnnnnnnnnnnnnnnnnnnnnnnnnnnnnnnnnnnnnnnnnnnnnnnnnnnnnnnnnnnnnnnnnnnnnnnnnnnnnnnnnnnnnnnnnnnnnnnnnnnnnnnnnnnnnnnnnnnnnnnnnnnnnnnnnnnnnnnnnnnnnnnnnnnnnnnnnnnnnnnnnnnnnnnnnnnnnnnnnnnnnnnnnnnnnnnnnnnnnnnnnnnnnnnnnnnnnnnnnnnnnnnnnnnnnnnnnnnnnnnnnnnnnnnnnnnnnnnnnnnnnnnnnnnnnnnnnnnnnnnnnnnnnnnnnnnnnnnnnnnnnnnnnnnnnnnnnnnnnnnnnnnnnnnnnnnnnnnnnnnnnnnnnnnnnnnnnnnnnnnnnnnnnnnnnnnnnnnnnnnnnnnnnnnnnnnnnnnnnnnnnnnnnnnnnnnnnnnnnnnnnnnnnnnnnnnnnnnnnnnnnnnnnnnnnnnnnnnnnnnnnnnnnnnnnnnnnnnnnnnnnnnnnnnnnnnnnnnnnnnnnnnnnnnnnnnnnnnnnnnnnnnnnnnnnnnnnnnnnnnnnnnnnnnnnnnnnnnnnnnnnnnnnnnnnnnnnnnnnnnnnnnnnnnnnnnnnnnnnnnnnnnnnnnnnnnnnnnnnnnnnnnnnnnnnnnnnnnnnnnnnnnnnnnnnnnnnnnnnnnnnnnnnnnnnnnnnnnnnnnnnnnnnnnnnnnnnnnnnnnnnnnnnnnnnnnnnnnnnnnnnnnnnnnnnnnnnnnnnnnnnnnnnnnnnnnnnnnnnnnnnnnnnnnnnnnnnnnnnnnnnnnnnnnnnnnnnnnnnnnnnnnnnnnnnnnnnnnnnnnnnnnnnnnnnnnnnnnnnnnnnnnnnnnnnnnnnnnnnnnnnnnnnnnnnnnnnnnnnnnnnnnnnnnnnnnnnnnnnnnnnnnnnnnnnnnnnnnnnnnnnnnnnnnnnnnnnnnnnnnnnnnnnnnnnnnnnnnnnnnnnnnnnnnnnnnnnnnnnnnnnnnnnnnnnnnnnnnnnnnnnnnnnnnnnnnnnnnnnnnnnnnnnnnnnnnnnnnnnnnnnnnnnnnnnnnnnnnnnnnnnnnnnnnnnnnnnnnnnnnnnnnnnnnnnnnnnnnnnnnnnnnnnnnnnnnnnnnnnnnnnnnnnnnnnnnnnnnnnnnnnnnnnnnnnnnnnnnnnnnnnnnnnnnnnnnnnnnnnnnnnnnnnnnnnnnnnnnnnnnnnnnnnnnnnnnnnnnnnnnnnnnnnnnnnnnnnnnnnnnnnnnnnnnnnnnnnnnnnnnnnnnnnnnnnnnnnnnnnnnnnnnnnnnnnnnnnnnnnnnnnnnnnnnnnnnnnnnnnnnnnnnnnnnnnnnnnnnnnnnnnnnnnnnnnnnnnnnnnnnnnnnnnnnnnnnnnnnnnnnnnnnnnnnnnnnnnnnnnnnnnnnnnnnnnnnnnnnnnnnnnnnnnnnnnnnnnnnnnnnnnnnnnnnnnnnnnnnnnnnnnnnnnnnnnnnnnnnnnnnnnnnnnnnnnnnnnnnnnnnnnnnnnnnnnnnnnnnnnnnnnnnnnnnnnnnnnnnnnnnnnnnnnnnnnnnnnnnnnnnnnnnnnnnnnnnnnnnnnnnnnnnnnnnnnnnnnnnnnnnnnnnnnnnnnnnnnnnnnnnnnnnnnnnnnnnnnnnnnnnnnnnnnnnnnnnnnnnnnnnnnnnnnnnnnnnnnnnnnnnnnnnnnnnnnnnnnnnnnnnnnnnnnnnnnnnnnnnnnnnnnnnnnnnnnnnnnnnnnnnnnnnnnnnnnnnnnnnnnnnnnnnnnnnnnnnnnnnnnnnnnnnnnnnnnnnnnnnnnnnnnnnnnnnnnnnnnnnnnnnnnnnnnnnnnnnnnnnnnnnnnnnnnnnnnnnnnnnnnnnnnnnnnnnnnnnnnnnnnnnnnnnnnnnnnnnnnnnnnnnnnnnnnnnnnnnnnnnnnnnnnnnnnnnnnnnnnnnnnnnnnnnnnnnnnnnnnnnnnnnnnnnnnnnnnnnnnnnnnnnnnnnnnnnnnnnnnnnnnnnnnnnnnnnnnnnnnnnnnnnnnnnnnnnnnnnnnnnnnnnnnnnnnnnnnnnnnnnnnnnnnnnnnnnnnnnnnnnnnnnnnnnnnnnnnnnnnnnnnnnnnnnnnnnnnnnnnnnnnnnnnnnnnnnnnnnnnnnnnnnnnnnnnnnnnnnnnnnnnnnnnnnnnnnnnnnnnnnnnnnnnnnnnnnnnnnnnnnnnnnnnnnnnnnnnnnnnnnnnnnnnnnnnnnnnnnnnnnnnnnnnnnnnnnnnnnnnnnnnnnnnnnnnnnnnnnnnnnnnnnnnnnnnnnnnnnnnnnnnnnnnnnnnnnnnnnnnnnnnnnnnnnnnnnnnnnnnnnnnnnnnnnnnnnnnnnnnnnnnnnnnnnnnnnnnnnnnnnnnnnnnnnnnnnnnnnnnnnnnnnnnnnnnnnnnnnnnnnnnnnnnnnnnnnnnnnnnnnnnnnnnnnnnnnnnnnnnnnnnnnnnnnnnnnnnnnnnnnnnnnnnnnnnnnnnnnnnnnnnnnnnnnnnnnnnnnnnnnnnnnnnnnnnnnnnnnnnnnnnnnnnnnnnnnnnnnnnnnnnnnnnnnnnnnnnnnnnnnnnnnnnnnnnnnnnnnnnnnnnnnnnnnnnnnnnnnnnnnnnnnnnnnnnnnnnnnnnnnnnnnnnnnnnnnnnnnnnnnnnnnnnnnnnnnnnnnnnnnnnnnnnnnnnnnnnnnnnnnnnnnnnnnnnnnnnnnnnnnnnnnnnnnnnnnnnnnnnnnnnnnnnnnnnnnnnnnnnnnnnnnnnnnnnnnnnnnnnnnnnnnnnnnnnnnnnnnnnnnnnnnnnnnnnnnnnnnnnnnnnnnnnnnnnnnnnnnnnnnnnnnnnnnnnnnnnnnnnnnnnnnnnnnnnnnnnnnnnnnnnnnnnnnnnnnnnnnnnnnnnnnnnnnnnnnnnnnnnnnnnnnnnnnnnnnnnnnnnnnnnnnnnnnnnnnnnnnnnnnnnnnnnnnnnnnnnnnnnnnnnnnnnnnnnnnnnnnnnnnnnnnnnnnnnnnnnnnnnnnnnnnnnnnnnnnnnnnnnnnnnnnnnnnnnnnnnnnnnnnnnnnnnnnnnnnnnnnnnnnnnnnnnnnnnnnnnnnnnnnnnnnnnnnnnnnnnnnnnnnnnnnnnnnnnnnnnnnnnnnnnnnnnnnnnnnnnnnnnnnnnnnnnnnnnnnnnnnnnnnnnnnnnnnnnnnnnnnnnnnnnnnnnnnnnnnnnnnnnnnnnnnnnnnnnnnnnnnnnnnnnnnnnnnnnnnnnnnnnnnnnnnnnnnnnnnnnnnnnnnnnnnnnnnnnnnnnnnnnnnnnnnnnnnnnnnnnnnnnnnnnnnnnnnnnnnnnnnnnnnnnnnnnnnnnnnnnnnnnnnnnnnnnnnnnnnnnnnnnnnnnnnnnnnnnnnnnnnnnnnnnnnnnnnnnnnnnnnnnnnnnnnnnnnnnnnnnnnnnnnnnnnnnnnnnnnnnnnnnnnnnnnnnnnnnnnnnnnnnnnnnnnnnnnnnnnnnnnnnnnnnnnnnnnnnnnnnnnnnnnnnnnnnnnnnnnnnnnnnnnnnnnnnnnnnnnnnnnnnnnnnnnnnnnnnnnnnnnnnnnnnnnnnnnnnnnnnnnnnnnnnnnnnnnnnnnnnnnnnnnnnnnnnnnnnnnnnnnnnnnnnnnnnnnnnnnnnnnnnnnnnnnnnnnnnnnnnnnnnnnnnnnnnnnnnnnnnnnnnnnnnnnnnnnnnnnnnnnnnnnnnnnnnnnnnnnnnnnnnnnnnnnnnnnnnnnnnnnnnnnnnnnnnnnnnnnnnnnnnnnnnnnnnnnnnnnnnnnnnnnnnnnnnnnnnnnnnnnnnnnnnnnnnnnnnnnnnnnnnnnnnnnnnnnnnnnnnnnnnnnnnnnnnnnnnnnnnnnnnnnnnnnnnnnnnnnnnnnnnnnnnnnnnnnnnnnnnnnnnnnnnnnnnnnnnnnnnnnnnnnnnnnnnnnnnnnnnnnnnnnnnnnnnnnnnnnnnnnnnnnnnnnnnnnnnnnnnnnnnnnnnnnnnnnnnnnnnnnnnnnnnnnnnnnnnnnnnnnnnnnnnnnnnnnnnnnnnnnnnnnnnnnnnnnnnnnnnnnnnnnnnnnnnnnnnnnnnnnnnnnnnnnnnnnnnnnnnnnnnnnnnnnnnnnnnnnnnnnnnnnnnnnnnnnnnnnnnnnnnnnnnnnnnnnnnnnnnnnnnnnnnnnnnnnnnnnnnnnnnnnnnnnnnnnnnnnnnnnnnnnnnnnnnnnnnnnnnnnnnnnnnnnnnnnnnnnnnnnnnnnnnnnnnnnnnnnnnnnnnnnnnnnnnnnnnnnnnnnnnnnnnnnnnnnnnnnnnnnnnnnnnnnnnnnnnnnnnnnnnnnnnnnnnnnnnnnnnnnnnnnnnnnnnnnnnnnnnnnnnnnnnnnnnnnnnnnnnnnnnnnnnnnnnnnnnnnnnnnnnnnnnnnnnnnnnnnnnnnnnnnnnnnnnnnnnnnnnnnnnnnnnnnnnnnnnnnnnnnnnnnnnnnnnnnnnnnnnnnnnnnnnnnnnnnnnnnnnnnnnnnnnnnnnnnnnnnnnnnnnnnnnnnnnnnnnnnnnnnnnnnnnnnnnnnnnnnnnnnnnnnnnnnnnnnnnnnnnnnnnnnnnnnnnnnnnnnnnnnnnnnnnnnnnnnnnnnnnnnnnnnnnnnnnnnnnnnnnnnnnnnnnnnnnnnnnnnnnnnnnnnnnnnnnnnnnnnnnnnnnnnnnnnnnnnnnnnnnnnnnnnnnnnnnnnnnnnnnnnnnnnnnnnnnnnnnnnnnnnnnnnnnnnnnnnnnnnnnnnnnnnnnnnnnnnnnnnnnnnnnnnnnnnnnnnnnnnnnnnnnnnnnnnnnnnnnnnnnnnnnnnnnnnnnnnnnnnnnnnnnnnnnnnnnnnnnnnnnnnnnnnnnnnnnnnnnnnnnnnnnnnnnnnnnnnnnnnnnnnnnnnnnnnnnnnnnnnnnnnnnnnnnnnnnnnnnnnnnnnnnnnnnnnnnnnnnnnnnnnnnnnnnnnnnnnnnnnnnnnnnnnnnnnnnnnnnnnnnnnnnnnnnnnnnnnnnnnnnnnnnnnnnnnnnnnnnnnnnnnnnnnnnnnnnnnnnnnnnnnnnnnnnnnnnnnnnnnnnnnnnnnnnnnnnnnnnnnnnnnnnnnnnnnnnnnnnnnnnnnnnnnnnnnnnnnnnnnnnnnnnnnnnnnnnnnnnnnnnnnnnnnnnnnnnnnnnnnnnnnnnnnnnnnnnnnnnnnnnnnnnnnnnnnnnnnnnnnnnnnnnnnnnnnnnnnnnnnnnnnnnnnnnnnnnnnnnnnnnnnnnnnnnnnnnnnnnnnnnnnnnnnnnnnnnnnnnnnnnnnnnnnnnnnnnnnnnnnnnnnnnnnnnnnnnnnnnnnnnnnnnnnnnnnnnnnnnnnnnnnnnnnnnnnnnnnnnnnnnnnnnnnnnnnnnnnnnnnnnnnnnnnnnnnnnnnnnnnnnnnnnnnnnnnnnnnnnnnnnnnnnnnnnnnnnnnnnnnnnnnnnnnnnnnnnnnnnnnnnnnnnnnnnnnnnnnnnnnnnnnnnnnnnnnnnnnnnnnnnnnnnnnnnnnnnnnnnnnnnnnnnnnnnnnnnnnnnnnnnnnnnnnnnnnnnnnnnnnnnnnnnnnnnnnnnnnnnnnnnnnnnnnnnnnnnnnnnnnnnnnnnnnnnnnnnnnnnnnnnnnnnnnnnnnnnnnnnnnnnnnnnnnnnnnnnnnnnnnnnnnnnnnnnnnnnnnnnnnnnnnnnnnnnnnnnnnnnnnnnnnnnnnnnnnnnnnnnnnnnnnnnnnnnnnnnnnnnnnnnnnnnnnnnnnnnnnnnnnnnnnnnnnnnnnnnnnnnnnnnnnnnnnnnnnnnnnnnnnnnnnnnnnnnnnnnnnnnnnnnnnnnnnnnnnnnnnnnnnnnnnnnnnnnnnnnnnnnnnnnnnnnnnnnnnnnnnnnnnnnnnnnnnnnnnnnnnnnnnnnnnnnnnnnnnnnnnnnnnnnnnnnnnnnnnnnnnnnnnnnnnnnnnnnnnnnnnnnnnnnnnnnnnnnnnnnnnnnnnnnnnnnnnnnnnnnnnnnnnnnnnnnnnnnnnnnnnnnnnnnnnnnnnnnnnnnnnnnnnnnnnnnnnnnnnnnnnnnnnnnnnnnnnnnnnnnnnnnnnnnnnnnnnnnnnnnnnnnnnnnnnnnnnnnnnnnnnnnnnnnnnnnnnnnnnnnnnnnnnnnnnnnnnnnnnnnnnnnnnnnnnnnnnnnnnnnnnnnnnnnnnnnnnnnnnnnnnnnnnnnnnnnnnnnnnnnnnnnnnnnnnnnnnnnnnnnnnnnnnnnnnnnnnnnnnnnnnnnnnnnnnnnnnnnnnnnnnnnnnnnnnnnnnnnnnnnnnnnnnnnnnnnnnnnnnnnnnnnnnnnnnnnnnnnnnnnnnnnnnnnnnnnnnnnnnnnnnnnnnnnnnnnnnnnnnnnnnnnnnnnnnnnnnnnnnnnnnnnnnnnnnnnnnnnnnnnnnnnnnnnnnnnnnnnnnnnnnnnnnnnnnnnnnnnnnnnnnnnnnnnnnnnnnnnnnnnnnnnnnnnnnnnnnnnnnnnnnnnnnnnnnnnnnnnnnnnnnnnnnnnnnnnnnnnnnnnnnnnnnnnnnnnnnnnnnnnnnnnnnnnnnnnnnnnnnnnnnnnnnnnnnnnnnnnnnnnnnnnnnnnnnnnnnnnnnnnnnnnnnnnnnnnnnnnnnnnnnnnnnnnnnnnnnnnnnnnnnnnnnnnnnnnnnnnnnnnnnnnnnnnnnnnnnnnnnnnnnnnnnnnnnnnnnnnnnnnnnnnnnnnnnnnnnnnnnnnnnnnnnnnnnnnnnnnnnnnnnnnnnnnnnnnnnnnnnnnnnnnnnnnnnnnnnnnnnnnnnnnnnnnnnnnnnnnnnnnnnnnnnnnnnnnnnnnnnnnnnnnnnnnnnnnnnnnnnnnnnnnnnnnnnnnnnnnnnnnnnnnnnnnnnnnnnnnnnnnnnnnnnnnnnnnnnnnnnnnnnnnnnnnnnnnnnnnnnnnnnnnnnnnnnnnnnnnnnnnnnnnnnnnnnnnnnnnnnnnnnnnnnnnnnnnnnnnnnnnnnnnnnnnnnnnnnnnnnnnnnnnnnnnnnnnnnnnnnnnnnnnnnnnnnnnnnnnnnnnnnnnnnnnnnnnnnnnnnnnnnnnnnnnnnnnnnnnnnnnnnnnnnnnnnnnnnnnnnnnnnnnnnnnnnnnnnnnnnnnnnnnnnnnnnnnnnnnnnnnnnnnnnnnnnnnnnnnnnnnnnnnnnnnnnnnnnnnnnnnnnnnnnnnnnnnnnnnnnnnnnnnnnnnnnnnnnnnnnnnnnnnnnnnnnnnnnnnnnnnnnnnnnnnnnnnnnnnnnnnnnnnnnnnnnnnnnnnnnnnnnnnnnnnnnnnnnnnnnnnnnnnnnnnnnnnnnnnnnnnnnnnnnnnnnnnnnnnnnnnnnnnnnnnnnnnnnnnnnnnnnnnnnnnnnnnnnnnnnnnnnnnnnnnnnnnnnnnnnnnnnnnnnnnnnnnnnnnnnnnnnnnnnnnnnnnnnnnnnnnnnnnnnnnnnnnnnnnnnnnnnnnnnnnnnnnnnnnnnnnnnnnnnnnnnnnnnnnnnnnnnnnnnnnnnnnnnnnnnnnnnnnnnnnnnnnnnnnnnnnnnnnnnnnnnnnnnnnnnnnnnnnnnnnnnnnnnnnnnnnnnnnnnnnnnnnnnnnnnnnnnnnnnnnnnnnnnnnnnnnnnnnnnnnnnnnnnnnnnnnnnnnnnnnnnnnnnnnnnnnnnnnnnnnnnnnnnnnnnnnnnnnnnnnnnnnnnnnnnnnnnnnnnnnnnnnnnnnnnnnnnnnnnnnnnnnnnnnnnnnnnnnnnnnnnnnnnnnnnnnnnnnnnnnnnnnnnnnnnnnnnnnnnnnnnnnnnnnnnnnnnnnnnnnnnnnnnnnnnnnnnnnnnnnnnnnnnnnnnnnnnnnnnnnnnnnnnnnnnnnnnnnnnnnnnnnnnnnnnnnnnnnnnnnnnnnnnnnnnnnnnnnnnnnnnnnnnnnnnnnnnnnnnnnnnnnnnnnnnnnnnnnnnnnnnnnnnnnnnnnnnnnnnnnnnnnnnnnnnnnnnnnnnnnnnnnnnnnnnnnnnnnnnnnnnnnnnnnnnnnnnnnnnnnnnnnnnnnnnnnnnnnnnnnnnnnnnnnnnnnnnnnnnnnnnnnnnnnnnnnnnnnnnnnnnnnnnnnnnnnnnnnnnnnnnnnnnnnnnnnnnnnnnnnnnnnnnnnnnnnnnnnnnnnnnnnnnnnnnnnnnnnnnnnnnnnnnnnnnnnnnnnnnnnnnnnnnnnnnnnnnnnnnnnnnnnnnnnnnnnnnnnnnnnnnnnnnnnnnnnnnnnnnnnnnnnnnnnnnnnnnnnnnnnnnnnnnnnnnnnnnnnnnnnnnnnnnnnnnnnnnnnnnnnnnnnnnnnnnnnnnnnnnnnnnnnnnnnnnnnnnnnnnnnnnnnnnnnnnnnnnnnnnnnnnnnnnnnnnnnnnnnnnnnnnnnnnnnnnnnnnnnnnnnnnnnnnnnnnnnnnnnnnnnnnnnnnnnnnnnnnnnnnnnnnnnnnnnnnnnnnnnnnnnnnnnnnnnnnnnnnnnnnnnnnnnnnnnnnnnnnnnnnnnnnnnnnnnnnnnnnnnnnnnnnnnnnnnnnnnnnnnnnnnnnnnnnnnnnnnnnnnnnnnnnnnnnnnnnnnnnnnnnnnnnnnnnnnnnnnnnnnnnnnnnnnnnnnnnnnnnnnnnnnnnnnnnnnnnnnnnnnnnnnnnnnnnnnnnnnnnnnnnnnnnnnnnnnnnnnnnnnnnnnnnnnnnnnnnnnnnnnnnnnnnnnnnnnnnnnnnnnnnnnnnnnnnnnnnnnnnnnnnnnnnnnnnnnnnnnnnnnnnnnnnnnnnnnnnnnnnnnnnnnnnnnnnnnnnnnnnnnnnnnnnnnnnnnnnnnnnnnnnnnnnnnnnnnnnnnnnnnnnnnnnnnnnnnnnnnnnnnnnnnnnnnnnnnnnnnnnnnnnnnnnnnnnnnnnnnnnnnnnnnnnnnnnnnnnnnnnnnnnnnnnnnnnnnnnnnnnnnnnnnnnnnnnnnnnnnnnnnnnnnnnnnnnnnnnnnnnnnnnnnnnnnnnnnnnnnnnnnnnnnnnnnnnnnnnnnnnnnnnnnnnnnnnnnnnnnnnnnnnnnnnnnnnnnnnnnnnnnnnnnnnnnnnnnnnnnnnnnnnnnnnnnnnnnnnnnnnnnnnnnnnnnnnnnnnnnnnnnnnnnnnnnnnnnnnnnnnnnnnnnnnnnnnnnnnnnnnnnnnnnnnnnnnnnnnnnnnnnnnnnnnnnnnnnnnnnnnnnnnnnnnnnnnnnnnnnnnnnnnnnnnnnnnnnnnnnnnnnnnnnnnnnnnnnnnnnnnnnnnnnnnnnnnnnnnnnnnnnnnnnnnnnnnnnnnnnnnnnnnnnnnnnnnnnnnnnnnnnnnnnnnnnnnnnnnnnnnnnnnnnnnnnnnnnnnnnnnnnnnnnnnnnnnnnnnnnnnnnnnnnnnnnnnnnnnnnnnnnnnnnnnnnnnnnnnnnnnnnnnnnnnnnnnnnnnnnnnnnnnnnnnnnnnnnnnnnnnnnnnnnnnnnnnnnnnnnnnnnnnnnnnnnnnnnnnnnnnnnnnnnnnnnnnnnnnnnnnnnnnnnnnnnnnnnnnnnnnnnnnnnnnnnnnnnnnnnnnnnnnnnnnnnnnnnnnnnnnnnnnnnnnnnnnnnnnnnnnnnnnnnnnnnnnnnnnnnnnnnnnnnnnnnnnnnnnnnnnnnnnnnnnnnnnnnnnnnnnnnnnnnnnnnnnnnnnnnnnnnnnnnnnnnnnnnnnnnnnnnnnnnnnnnnnnnnnnnnnnnnnnnnnnnnnnnnnnnnnnnnnnnnnnnnnnnnnnnnnnnnnnnnnnnnnnnnnnnnnnnnnnnnnnnnnnnnnnnnnnnnnnnnnnnnnnnnnnnnnnnnnnnnnnnnnnnnnnnnnnnnnnnnnnnnnnnnnnnnnnnnnnnnnnnnnnnnnnnnnnnnnnnnnnnnnnnnnnnnnnnnnnnnnnnnnnnnnnnnnnnnnnnnnnnnnnnnnnnnnnnnnnnnnnnnnnnnnnnnnnnnnnnnnnnnnnnnnnnnnnnnnnnnnnnnnnnnnnnnnnnnnnnnnnnnnnnnnnnnnnnnnnnnnnnnnnnnnnnnnnnnnnnnnnnnnnnnnnnnnnnnnnnnnnnnnnnnnnnnnnnnnnnnnnnnnnnnnnnnnnnnnnnnnnnnnnnnnnnnnnnnnnnnnnnnnnnnnnnnnnnnnnnnnnnnnnnnnnnnnnnnnnnnnnnnnnnnnnnnnnnnnnnnnnnnnnnnnnnnnnnnnnnnnnnnnnnnnnnnnnnnnnnnnnnnnnnnnnnnnnnnnnnnnnnnnnnnnnnnnnnnnnnnnnnnnnnnnnnnnnnnnnnnnnnnnnnnnnnnnnnnnnnnnnnnnnnnnnnnnnnnnnnnnnnnnnnnnnnnnnnnnnnnnnnnnnnnnnnnnnnnnnnnnnnnnnnnnnnnnnnnnnnnnnnnnnnnnnnnnnnnnnnnnnnnnnnnnnnnnnnnnnnnnnnnnnnnnnnnnnnnnnnnnnnnnnnnnnnnnnnnnnnnnnnnnnnnnnnnnnnnnnnnnnnnnnnnnnnnnnnnnnnnnnnnnnnnnnnnnnnnnnnnnnnnnnnnnnnnnnnnnnnnnnnnnnnnnnnnnnnnnnnnnnnnnnnnnnnnnnnnnnnnnnnnnnnnnnnnnnnnnnnnnnnnnnnnnnnnnnnnnnnnnnnnnnnnnnnnnnnnnnnnnnnnnnnnnnnnnnnnnnnnnnnnnnnnnnnnnnnnnnnnnnnnnnnnnnnnnnnnnnnnnnnnnnnnnnnnnnnnnnnnnnnnnnnnnnnnnnnnnnnnnnnnnnnnnnnnnnnnnnnnnnnnnnnnnnnnnnnnnnnnnnnnnnnnnnnnnnnnnnnnnnnnnnnnnnnnnnnnnnnnnnnnnnnnnnnnnnnnnnnnnnnnnnnnnnnnnnnnnnnnnnnnnnnnnnnnnnnnnnnnnnnnnnnnnnnnnnnnnnnnnnnnnnnnnnnnnnnnnnnnnnnnnnnnnnnnnnnnnnnnnnnnnnnnnnnnnnnnnnnnnnnnnnnnnnnnnnnnnnnnnnnnnnnnnnnnnnnnnnnnnnnnnnnnnnnnnnnnnnnnnnnnnnnnnnnnnnnnnnnnnnnnnnnnnnnnnnnnnnnnnnnnnnnnnnnnnnnnnnnnnnnnnnnnnnnnnnnnnnnnnnnnnnnnnnnnnnnnnnnnnnnnnnnnnnnnnnnnnnnnnnnnnnnnnnnnnnnnnnnnnnnnnnnnnnnnnnnnnnnnnnnnnnnnnnnnnnnnnnnnnnnnnnnnnnnnnnnnnnnnnnnnnnnnnnnnnnnnnnnnnnnnnnnnnnnnnnnnnnnnnnnnnnnnnnnnnnnnnnnnnnnnnnnnnnnnnnnnnnnnnnnnnnnnnnnnnnnnnnnnnnnnnnnnnnnnnnnnnnnnnnnnnnnnnnnnnnnnnnnnnnnnnnnnnnnnnnnnnnnnnnnnnnnnnnnnnnnnnnnnnnnnnnnnnnnnnnnnnnnnnnnnnnnnnnnnnnnnnnnnnnnnnnnnnnnnnnnnnnnnnnnnnnnnnnnnnnnnnnnnnnnnnnnnnnnnnnnnnnnnnnnnnnnnnnnnnnnnnnnnnnnnnnnnnnnnnnnnnnnnnnnnnnnnnnnnnnnnnnnnnnnnnnnnnnnnnnnnnnnnnnnnnnnnnnnnnnnnnnnnnnnnnnnnnnnnnnnnnnnnnnnnnnnnnnnnnnnnnnnnnnnnnnnnnnnnnnnnnnnnnnnnnnnnnnnnnnnnnnnnnnnnnnnnnnnnnnnnnnnnnnnnnnnnnnnnnnnnnnnnnnnnnnnnnnnnnnnnnnnnnnnnnnnnnnnnnnnnnnnnnnnnnnnnnnnnnnnnnnnnnnnnnnnnnnnnnnnnnnnnnnnnnnnnnnnnnnnnnnnnnnnnnnnnnnnnnnnnnnnnnnnnnnnnnnnnnnnnnnnnnnnnnnnnnnnnnnnnnnnnnnnnnnnnnnnnnnnnnnnnnnnnnnnnnnnnnnnnnnnnnnnnnnnnnnnnnnnnnnnnnnnnnnnnnnnnnnnnnnnnnnnnnnnnnnnnnnnnnnnnnnnnnnnnnnnnnnnnnnnnnnnnnnnnnnnnnnnnnnnnnnnnnnnnnnnnnnnnnnnnnnnnnnnnnnnnnnnnnnnnnnnnnnnnnnnnnnnnnnnnnnnnnnnnnnnnnnnnnnnnnnnnnnnnnnnnnnnnnnnnnnnnnnnnnnnnnnnnnnnnnnnnnnnnnnnnnnnnnnnnnnnnnnnnnnnnnnnnnnnnnnnnnnnnnnnnnnnnnnnnnnnnnnnnnnnnnnnnnnnnnnnnnnnnnnnnnnnnnnnnnnnnnnnnnnnnnnnnnnnnnnnnnnnnnnnnnnnnnnnnnnnnnnnnnnnnnnnnnnnnnnnnnnnnnnnnnnnnnnnnnnnnnnnnnnnnnnnnnnnnnnnnnnnnnnnnnnnnnnnnnnnnnnnnnnnnnnnnnnnnnnnnnnnnnnnnnnnnnnnnnnnnnnnnnnnnnnnnnnnnnnnnnnnnnnnnnnnnnnnnnnnnnnnnnnnnnnnnnnnnnnnnnnnnnnnnnnnnnnnnnnnnnnnnnnnnnnnnnnnnnnnnnnnnnnnnnnnnnnnnnnnnnnnnnnnnnnnnnnnnnnnnnnnnnnnnnnnnnnnnnnnnnnnnnnnnnnnnnnnnnnnnnnnnnnnnnnnnnnnnnnnnnnnnnnnnnnnnnnnnnnnnnnnnnnnnnnnnnnnnnnnnnnnnnnnnnnnnnnnnnnnnnnnnnnnnnnnnnnnnnnnnnnnnnnnnnnnnnnnnnnnnnnnnnnnnnnnnnnnnnnnnnnnnnnnnnnnnnnnnnnnnnnnnnnnnnnnnnnnnnnnnnnnnnnnnnnnnnnnnnnnnnnnnnnnnnnnnnnnnnnnnnnnnnnnnnnnnnnnnnnnnnnnnnnnnnnnnnnnnnnnnnnnnnnnnnnnnnnnnnnnnnnnnnnnnnnnnnnnnnnnnnnnnnnnnnnnnnnnnnnnnnnnnnnnnnnnnnnnnnnnnnnnnnnnnnnnnnnnnnnnnnnnnnnnnnnnnnnnnnnnnnnnnnnnnnnnnnnnnnnnnnnnnnnnnnnnnnnnnnnnnnnnnnnnnnnnnnnnnnnnnnnnnnnnnnnnnnnnnnnnnnnnnnnnnnnnnnnnnnnnnnnnnnnnnnnnnnnnnnnnnnnnnnnnnnnnnnnnnnnnnnnnnnnnnnnnnnnnnnnnnnnnnnnnnnnnnnnnnnnnnnnnnnnnnnnnnnnnnnnnnnnnnnnnnnnnnnnnnnnnnnnnnnnnnnnnnnnnnnnnnnnnnnnnnnnnnnnnnnnnnnnnnnnnnnnnnnnnnnnnnnnnnnnnnnnnnnnnnnnnnnnnnnnnnnnnnnnnnnnnnnnnnnnnnnnnnnnnnnnnnnnnnnnnnnnnnnnnnnnnnnnnnnnnnnnnnnnnnnnnnnnnnnnnnnnnnnnnnnnnnnnnnnnnnnnnnnnnnnnnnnnnnnnnnnnnnnnnnnnnnnnnnnnnnnnnnnnnnnnnnnnnnnnnnnnnnnnnnnnnnnnnnnnnnnnnnnnnnnnnnnnnnnnnnnnnnnnnnnnnnnnnnnnnnnnnnnnnnnnnnnnnnnnnnnnnnnnnnnnnnnnnnnnnnnnnnnnnnnnnnnnnnnnnnnnnnnnnnnnnnnnnnnnnnnnnnnnnnnnnnnnnnnnnnnnnnnnnnnnnnnnnnnnnnnnnnnnnnnnnnnnnnnnnnnnnnnnnnnnnnnnnnnnnnnnnnnnnnnnnnnnnnnnnnnnnnnnnnnnnnnnnnnnnnnnnnnnnnnnnnnnnnnnnnnnnnnnnnnnnnnnnnnnnnnnnnnnnnnnnnnnnnnnnnnnnnnnnnnnnnnnnnnnnnnnnnnnnnnnnnnnnnnnnnnnnnnnnnnnnnnnnnnnnnnnnnnnnnnnnnnnnnnnnnnnnnnnnnnnnnnnnnnnnnnnnnnnnnnnnnnnnnnnnnnnnnnnnnnnnnnnnnnnnnnnnnnnnnnnnnnnnnnnnnnnnnnnnnnnnnnnnnnnnnnnnnnnnnnnnnnnnnnnnnnnnnnnnnnnnnnnnnnnnnnnnnnnnnnnnnnnnnnnnnnnnnnnnnnnnnnnnnnnnnnnnnnnnnnnnnnnnnnnnnnnnnnnnnnnnnnnnnnnnnnnnnnnnnnnnnnnnnnnnnnnnnnnnnnnnnnnnnnnnnnnnnnnnnnnnnnnnnnnnnnnnnnnnnnnnnnnnnnnnnnnnnnnnnnnnnnnnnnnnnnnnnnnnnnnnnnnnnnnnnnnnnnnnnnnnnnnnnnnnnnnnnnnnnnnnnnnnnnnnnnnnnnnnnnnnnnnnnnnnnnnnnnnnnnnnnnnnnnnnnnnnnnnnnnnnnnnnnnnnnnnnnnnnnnnnnnnnnnnnnnnnnnnnnnnnnnnnnnnnnnnnnnnnnnnnnnnnnnnnnnnnnnnnnnnnnnnnnnnnnnnnnnnnnnnnnnnnnnnnnnnnnnnnnnnnnnnnnnnnnnnnnnnnnnnnnnnnnnnnnnnnnnnnnnnnnnnnnnnnnnnnnnnnnnnnnnnnnnnnnnnnnnnnnnnnnnnnnnnnnnnnnnnnnnnnnnnnnnnnnnnnnnnnnnnnnnnnnnnnnnnnnnnnnnnnnnnnnnnnnnnnnnnnnnnnnnnnnnnnnnnnnnnnnnnnnnnnnnnnnnnnnnnnnnnnnnnnnnnnnnnnnnnnnnnnnnnnnnnnnnnnnnnnnnnnnnnnnnnnnnnnnnnnnnnnnnnnnnnnnnnnnnnnnnnnnnnnnnnnnnnnnnnnnnnnnnnnnnnnnnnnnnnnnnnnnnnnnnnnnnnnnnnnnnnnnnnnnnnnnnnnnnnnnnnnnnnnnnnnnnnnnnnnnnnnnnnnnnnnnnnnnnnnnnnnnnnnnnnnnnnnnnnnnnnnnnnnnnnnnnnnnnnnnnnnnnnnnnnnnnnnnnnnnnnnnnnnnnnnnnnnnnnnnnnnnnnnnnnnnnnnnnnnnnnnnnnnnnnnnnnnnnnnnnnnnnnnnnnnnnnnnnnnnnnnnnnnnnnnnnnnnnnnnnnnnnnnnnnnnnnnnnnnnnnnnnnnnnnnnnnnnnnnnnnnnnnnnnnnnnnnnnnnnnnnnnnnnnnnnnnnnnnnnnnnnnnnnnnnnnnnnnnnnnnnnnnnnnnnnnnnnnnnnnnnnnnnnnnnnnnnnnnnnnnnnnnnnnnnnnnnnnnnnnnnnnnnnnnnnnnnnnnnnnnnnnnnnnnnnnnnnnnnnnnnnnnnnnnnnnnnnnnnnnnnnnnnnnnnnnnnnnnnnnnnnnnnnnnnnnnnnnnnnnnnnnnnnnnnnnnnnnnnnnnnnnnnnnnnnnnnnnnnnnnnnnnnnnnnnnnnnnnnnnnnnnnnnnnnnnnnnnnnnnnnnnnnnnnnnnnnnnnnnnnnnnnnnnnnnnnnnnnnnnnnnnnnnnnnnnnnnnnnnnnnnnnnnnnnnnnnnnnnnnnnnnnnnnnnnnnnnnnnnnnnnnnnnnnnnnnnnnnnnnnnnnnnnnnnnnnnnnnnnnnnnnnnnnnnnnnnnnnnnnnnnnnnnnnnnnnnnnnnnnnnnnnnnnnnnnnnnnnnnnnnnnnnnnnnnnnnnnnnnnnnnnnnnnnnnnnnnnnnnnnnnnnnnnnnnnnnnnnnnnnnnnnnnnnnnnnnnnnnnnnnnnnnnnnnnnnnnnnnnnnnnnnnnnnnnnnnnnnnnnnnnnnnnnnnnnnnnnnnnnnnnnnnnnnnnnnnnnnnnnnnnnnnnnnnnnnnnnnnnnnnnnnnnnnnnnnnnnnnnnnnnnnnnnnnnnnnnnnnnnnnnnnnnnnnnnnnnnnnnnnnnnnnnnnnnnnnnnnnnnnnnnnnnnnnnnnnnnnnnnnnnnnnnnnnnnnnnnnnnnnnnnnnnnnnnnnnnnnnnnnnnnnnnnnnnnnnnnnnnnnnnnnnnnnnnnnnnnnnnnnnnnnnnnnnnnnnnnnnnnnnnnnnnnnnnnnnnnnnnnnnnnnnnnnnnnnnnnnnnnnnnnnnnnnnnnnnnnnnnnnnnnnnnnnnnnnnnnnnnnnnnnnnnnnnnnnnnnnnnnnnnnnnnnnnnnnnnnnnnnnnnnnnnnnnnnnnnnnnnnnnnnnnnnnnnnnnnnnnnnnnnnnnnnnnnnnnnnnnnnnnnnnnnnnnnnnnnnnnnnnnnnnnnnnnnnnnnnnnnnnnnnnnnnnnnnnnnnnnnnnnnnnnnnnnnnnnnnnnnnnnnnnnnnnnnnnnnnnnnnnnnnnnnnnnnnnnnnnnnnnnnnnnnnnnnnnnnnnnnnnnnnnnnnnnnnnnnnnnnnnnnnnnnnnnnnnnnnnnnnnnnnnnnnnnnnnnnnnnnnnnnnnnnnnnnnnnnnnnnnnnnnnnnnnnnnnnnnnnnnnnnnnnnnnnnnnnnnnnnnnnnnnnnnnnnnnnnnnnnnnnnnnnnnnnnnnnnnnnnnnnnnnnnnnnnnnnnnnnnnnnnnnnnnnnnnnnnnnnnnnnnnnnnnnnnnnnnnnnnnnnnnnnnnnnnnnnnnnnnnnnnnnnnnnnnnnnnnnnnnnnnnnnnnnnnnnnnnnnnnnnnnnnnnnnnnnnnnnnnnnnnnnnnnnnnnnnnnnnnnnnnnnnnnnnnnnnnnnnnnnnnnnnnnnnnnnnnnnnnnnnnnnnnnnnnnnnnnnnnnnnnnnnnnnnnnnnnnnnnnnnnnnnnnnnnnnnnnnnnnnnnnnnnnnnnnnnnnnnnnnnnnnnnnnnnnnnnnnnnnnnnnnnnnnnnnnnnnnnnnnnnnnnnnnnnnnnnnnnnnnnnnnnnnnnnnnnnnnnnnnnnnnnnnnnnnnnnnnnnnnnnnnnnnnnnnnnnnnnnnnnnnnnnnnnnnnnnnnnnnnnnnnnnnnnnnnnnnnnnnnnnnnnnnnnnnnnnnnnnnnnnnnnnnnnnnnnnnnnnnnnnnnnnnnnnnnnnnnnnnnnnnnnnnnnnnnnnnnnnnnnnnnnnnnnnnnnnnnnnnnnnnnnnnnnnnnnnnnnnnnnnnnnnnnnnnnnnnnnnnnnnnnnnnnnnnnnnnnnnnnnnnnnnnnnnnnnnnnnnnnnnnnnnnnnnnnnnnnnnnnnnnnnnnnnnnnnnnnnnnnnnnnnnnnnnnnnnnnnnnnnnnnnnnnnnnnnnnnnnnnnnnnnnnnnnnnnnnnnnnnnnnnnnnnnnnnnnnnnnnnnnnnnnnnnnnnnnnnnnnnnnnnnnnnnnnnnnnnnnnnnnnnnnnnnnnnnnnnnnnnnnnnnnnnnnnnnnnnnnnnnnnnnnnnnnnnnnnnnnnnnnnnnnnnnnnnnnnnnnnnnnnnnnnnnnnnnnnnnnnnnnnnnnnnnnnnnnnnnnnnnnnnnnnnnnnnnnnnnnnnnnnnnnnnnnnnnnnnnnnnnnnnnnnnnnnnnnnnnnnnnnnnnnnnnnnnnnnnnnnnnnnnnnnnnnnnnnnnnnnnnnnnnnnnnnnnnnnnnnnnnnnnnnnnnnnnnnnnnnnnnnnnnnnnnnnnnnnnnnnnnnnnnnnnnnnnnnnnnnnnnnnnnnnnnnnnnnnnnnnnnnnnnnnnnnnnnnnnnnnnnnnnnnnnnnnnnnnnnnnnnnnnnnnnnnnnnnnnnnnnnnnnnnnnnnnnnnnnnnnnnnnnnnnnnnnnnnnnnnnnnnnnnnnnnnnnnnnnnnnnnnnnnnnnnnnnnnnnnnnnnnnnnnnnnnnnnnnnnnnnnnnnnnnnnnnnnnnnnnnnnnnnnnnnnnnnnnnnnnnnnnnnnnnnnnnnnnnnnnnnnnnnnnnnnnnnnnnnnnnnnnnnnnnnnnnnnnnnnnnnnnnnnnnnnnnnnnnnnnnnnnnnnnnnnnnnnnnnnnnnnnnnnnnnnnnnnnnnnnnnnnnnnnnnnnnnnnnnnnnnnnnnnnnnnnnnnnnnnnnnnnnnnnnnnnnnnnnnnnnnnnnnnnnnnnnnnnnnnnnnnnnnnnnnnnnnnnnnnnnnnnnnnnnnnnnnnnnnnnnnnnnnnnnnnnnnnnnnnnnnnnnnnnnnnnnnnnnnnnnnnnnnnnnnnnnnnnnnnnnnnnnnnnnnnnnnnnnnnnnnnnnnnnnnnnnnnnnnnnnnnnnnnnnnnnnnnnnnnnnnnnnnnnnnnnnnnnnnnnnnnnnnnnnnnnnnnnnnnnnnnnnnnnnnnnnnnnnnnnnnnnnnnnnnnnnnnnnnnnnnnnnnnnnnnnnnnnnnnnnnnnnnnnnnnnnnnnnnnnnnnnnnnnnnnnnnnnnnnnnnnnnnnnnnnnnnnnnnnnnnnnnnnnnnnnnnnnnnnnnnnnnnnnnnnnnnnnnnnnnnnnnnnnnnnnnnnnnnnnnnnnnnnnnnnnnnnnnnnnnnnnnnnnnnnnnnnnnnnnnnnnnnnnnnnnnnnnnnnnnnnnnnnnnnnnnnnnnnnnnnnnnnnnnnnnnnnnnnnnnnnnnnnnnnnnnnnnnnnnnnnnnnnnnnnnnnnnnnnnnnnnnnnnnnnnnnnnnnnnnnnnnnnnnnnnnnnnnnnnnnnnnnnnnnnnnnnnnnnnnnnnnnnnnnnnnnnnnnnnnnnnnnnnnnnnnnnnnnnnnnnnnnnnnnnnnnnnnnnnnnnnnnnnnnnnnnnnnnnnnnnnnnnnnnnnnnnnnnnnnnnnnnnnnnnnnnnnnnnnnnnnnnnnnnnnnnnnnnnnnnnnnnnnnnnnnnnnnnnnnnnnnnnnnnnnnnnnnnnnnnnnnnnnnnnnnnnnnnnnnnnnnnnnnnnnnnnnnnnnnnnnnnnnnnnnnnnnnnnnnnnnnnnnnnnnnnnnnnnnnnnnnnnnnnnnnnnnnnnnnnnnnnnnnnnnnnnnnnnnnnnnnnnnnnnnnnnnnnnnnnnnnnnnnnnnnnnnnnnnnnnnnnnnnnnnnnnnnnnnnnnnnnnnnnnnnnnnnnnnnnnnnnnnnnnnnnnnnnnnnnnnnnnnnnnnnnnnnnnnnnnnnnnnnnnnnnnnnnnnnnnnnnnnnnnnnnnnnnnnnnnnnnnnnnnnnnnnnnnnnnnnnnnnnnnnnnnnnnnnnnnnnnnnnnnnnnnnnnnnnnnnnnnnnnnnnnnnnnnnnnnnnnnnnnnnnnnnnnnnnnnnnnnnnnnnnnnnnnnnnnnnnnnnnnnnnnnnnnnnnnnnnnnnnnnnnnnnnnnnnnnnnnnnnnnnnnnnnnnnnnnnnnnnnnnnnnnnnnnnnnnnnnnnnnnnnnnnnnnnnnnnnnnnnnnnnnnnnnnnnnnnnnnnnnnnnnnnnnnnnnnnnnnnnnnnnnnnnnnnnnnnnnnnnnnnnnnnnnnnnnnnnnnnnnnnnnnnnnnnnnnnnnnnnnnnnnnnnnnnnnnnnnnnnnnnnnnnnnnnnnnnnnnnnnnnnnnnnnnnnnnnnnnnnnnnnnnnnnnnnnnnnnnnnnnnnnnnnnnnnnnnnnnnnnnnnnnnnnnnnnnnnnnnnnnnnnnnnnnnnnnnnnnnnnnnnnnnnnnnnnnnnnnnnnnnnnnnnnnnnnnnnnnnnnnnnnnnnnnnnnnnnnnnnnnnnnnnnnnnnnnnnnnnnnnnnnnnnnnnnnnnnnnnnnnnnnnnnnnnnnnnnnnnnnnnnnnnnnnnnnnnnnnnnnnnnnnnnnnnnnnnnnnnnnnnnnnnnnnnnnnnnnnnnnnnnnnnnnnnnnnnnnnnnnnnnnnnnnnnnnnnnnnnnnnnnnnnnnnnnnnnnnnnnnnnnnnnnnnnnnnnnnnnnnnnnnnnnnnnnnnnnnnnnnnnnnnnnnnnnnnnnnnnnnnnnnnnnnnnnnnnnnnnnnnnnnnnnnnnnnnnnnnnnnnnnnnnnnnnnnnnnnnnnnnnnnnnnnnnnnnnnnnnnnnnnnnnnnnnnnnnnnnnnnnnnnnnnnnnnnnnnnnnnnnnnnnnnnnnnnnnnnnnnnnnnnnnnnnnnnnnnnnnnnnnnnnnnnnnnnnnnnnnnnnnnnnnnnnnnnnnnnnnnnnnnnnnnnnnnnnnnnnnnnnnnnnnnnnnnnnnnnnnnnnnnnnnnnnnnnnnnnnnnnnnnnnnnnnnnnnnnnnnnnnnnnnnnnnnnnnnnnnnnnnnnnnnnnnnnnnnnnnnnnnnnnnnnnnnnnnnnnnnnnnnnnnnnnnnnnnnnnnnnnnnnnnnnnnnnnnnnnnnnnnnnnnnnnnnnnnnnnnnnnnnnnnnnnnnnnnnnnnnnnnnnnnnnnnnnnnnnnnnnnnnnnnnnnnnnnnnnnnnnnnnnnnnnnnnnnnnnnnnnnnnnnnnnnnnnnnnnnnnnnnnnnnnnnnnnnnnnnnnnnnnnnnnnnnnnnnnnnnnnnnnnnnnnnnnnnnnnnnnnnnnnnnnnnnnnnnnnnnnnnnnnnnnnnnnnnnnnnnnnnnnnnnnnnnnnnnnnnnnnnnnnnnnnnnnnnnnnnnnnnnnnnnnnnnnnnnnnnnnnnnnnnnnnnnnnnnnnnnnnnnnnnnnnnnnnnnnnnnnnnnnnnnnnnnnnnnnnnnnnnnnnnnnnnnnnnnnnnnnnnnnnnnnnnnnnnnnnnnnnnnnnnnnnnnnnnnnnnnnnnnnnnnnnnnnnnnnnnnnnnnnnnnnnnnnnnnnnnnnnnnnnnnnnnnnnnnnnnnnnnnnnnnnnnnnnnnnnnnnnnnnnnnnnnnnnnnnnnnnnnnnnnnnnnnnnnnnnnnnnnnnnnnnnnnnnnnnnnnnnnnnnnnnnnnnnnnnnnnnnnnnnnnnnnnnnnnnnnnnnnnnnnnnnnnnnnnnnnnnnnnnnnnnnnnnnnnnnnnnnnnnnnnnnnnnnnnnnnnnnnnnnnnnnnnnnnnnnnnnnnnnnnnnnnnnnnnnnnnnnnnnnnnnnnnnnnnnnnnnnnnnnnnnnnnnnnnnnnnnnnnnnnnnnnnnnnnnnnnnnnnnnnnnnnnnnnnnnnnnnnnnnnnnnnnnnnnnnnnnnnnnnnnnnnnnnnnnnnnnnnnnnnnnnnnnnnnnnnnnnnnnnnnnnnnnnnnnnnnnnnnnnnnnnnnnnnnnnnnnnnnnnnnnnnnnnnnnnnnnnnnnnnnnnnnnnnnnnnnnnnnnnnnnnnnnnnnnnnnnnnnnnnnnnnnnnnnnnnnnnnnnnnnnnnnnnnnnnnnnnnnnnnnnnnnnnnnnnnnnnnnnnnnnnnnnnnnnnnnnnnnnnnnnnnnnnnnnnnnnnnnnnnnnnnnnnnnnnnnnnnnnnnnnnnnnnnnnnnnnnnnnnnnnnnnnnnnnnnnnnnnnnnnnnnnnnnnnnnnnnnnnnnnnnnnnnnnnnnnnnnnnnnnnnnnnnnnnnnnnnnnnnnnnnnnnnnnnnnnnnnnnnnnnnnnnnnnnnnnnnnnnnnnnnnnnnnnnnnnnnnnnnnnnnnnnnnnnnnnnnnnnnnnnnnnnnnnnnnnnnnnnnnnnnnnnnnnnnnnnnnnnnnnnnnnnnnnnnnnnnnnnnnnnnnnnnnnnnnnnnnnnnnnnnnnnnnnnnnnnnnnnnnnnnnnnnnnnnnnnnnnnnnnnnnnnnnnnnnnnnnnnnnnnnnnnnnnnnnnnnnnnnnnnnnnnnnnnnnnnnnnnnnnnnnnnnnnnnnnnnnnnnnnnnnnnnnnnnnnnnnnnnnnnnnnnnnnnnnnnnnnnnnnnnnnnnnnnnnnnnnnnnnnnnnnnnnnnnnnnnnnnnnnnnnnnnnnnnnnnnnnnnnnnnnnnnnnnnnnnnnnnnnnnnnnnnnnnnnnnnnnnnnnnnnnnnnnnnnnnnnnnnnnnnnnnnnnnnnnnnnnnnnnnnnnnnnnnnnnnnnnnnnnnnnnnnnnnnnnnnnnnnnnnnnnnnnnnnnnnnnnnnnnnnnnnnnnnnnnnnnnnnnnnnnnnnnnnnnnnnnnnnnnnnnnnnnnnnnnnnnnnnnnnnnnnnnnnnnnnnnnnnnnnnnnnnnnnnnnnnnnnnnnnnnnnnnnnnnnnnnnnnnnnnnnnnnnnnnnnnnnnnnnnnnnnnnnnnnnnnnnnnnnnnnnnnnnnnnnnnnnnnnnnnnnnnnnnnnnnnnnnnnnnnnnnnnnnnnnnnnnnnnnnnnnnnnnnnnnnnnnnnnnnnnnnnnnnnnnnnnnnnnnnnnnnnnnnnnnnnnnnnnnnnnnnnnnnnnnnnnnnnnnnnnnnnnnnnnnnnnnnnnnnnnnnnnnnnnnnnnnnnnnnnnnnnnnnnnnnnnnnnnnnnnnnnnnnnnnnnnnnnnnnnnnnnnnnnnnnnnnnnnnnnnnnnnnnnnnnnnnnnnnnnnnnnnnnnnnnnnnnnnnnnnnnnnnnnnnnnnnnnnnnnnnnnnnnnnnnnnnnnnnnnnnnnnnnnnnnnnnnnnnnnnnnnnnnnnnnnnnnnnnnnnnnnnnnnnnnnnnnnnnnnnnnnnnnnnnnnnnnnnnnnnnnnnnnnnnnnnnnnnnnnnnnnnnnnnnnnnnnnnnnnnnnnnnnnnnnnnnnnnnnnnnnnnnnnnnnnnnnnnnnnnnnnnnnnnnnnnnnnnnnnnnnnnnnnnnnnnnnnnnnnnnnnnnnnnnnnnnnnnnnnnnnnnnnnnnnnnnnnnnnnnnnnnnnnnnnnnnnnnnnnnnnnnnnnnnnnnnnnnnnnnnnnnnnnnnnnnnnnnnnnnnnnnnnnnnnnnnnnnnnnnnnnnnnnnnnnnnnnnnnnnnnnnnnnnnnnnnnnnnnnnnnnnnnnnnnnnnnnnnnnnnnnnnnnnnnnnnnnnnnnnnnnnnnnnnnnnnnnnnnnnnnnnnnnnnnnnnnnnnnnnnnnnnnnnnnnnnnnnnnnnnnnnnnnnnnnnnnnnnnnnnnnnnnnnnnnnnnnnnnnnnnnnnnnnnnnnnnnnnnnnnnnnnnnnnnnnnnnnnnnnnnnnnnnnnnnnnnnnnnnnnnnnnnnnnnnnnnnnnnnnnnnnnnnnnnnnnnnnnnnnnnnnnnnnnnnnnnnnnnnnnnnnnnnnnnnnnnnnnnnnnnnnnnnnnnnnnnnnnnnnnnnnnnnnnnnnnnnnnnnnnnnnnnnnnnnnnnnnnnnnnnnnnnnnnnnnnnnnnnnnnnnnnnnnnnnnnnnnnnnnnnnnnnnnnnnnnnnnnnnnnnnnnnnnnnnnnnnnnnnnnnnnnnnnnnnnnnnnnnnnnnnnnnnnnnnnnnnnnnnnnnnnnnnnnnnnnnnnnnnnnnnnnnnnnnnnnnnnnnnnnnnnnnnnnnnnnnnnnnnnnnnnnnnnnnnnnnnnnnnnnnnnnnnnnnnnnnnnnnnnnnnnnnnnnnnnnnnnnnnnnnnnnnnnnnnnnnnnnnnnnnnnnnnnnnnnnnnnnnnnnnnnnnnnnnnnnnnnnnnnnnnnnnnnnnnnnnnnnnnnnnnnnnnnnnnnnnnnnnnnnnnnnnnnnnnnnnnnnnnnnnnnnnnnnnnnnnnnnnnnnnnnnnnnnnnnnnnnnnnnnnnnnnnnnnnnnnnnnnnnnnnnnnnnnnnnnnnnnnnnnnnnnnnnnnnnnnnnnnnnnnnnnnnnnnnnnnnnnnnnnnnnnnnnnnnnnnnnnnnnnnnnnnnnnnnnnnnnnnnnnnnnnnnnnnnnnnnnnnnnnnnnnnnnnnnnnnnnnnnnnnnnnnnnnnnnnnnnnnnnnnnnnnnnnnnnnnnnnnnnnnnnnnnnnnnnnnnnnnnnnnnnnnnnnnnnnnnnnnnnnnnnnnnnnnnnnnnnnnnnnnnnnnnnnnnnnnnnnnnnnnnnnnnnnnnnnnnnnnnnnnnnnnnnnnnnnnnnnnnnnnnnnnnnnnnnnnnnnnnnnnnnnnnnnnnnnnnnnnnnnnnnnnnnnnnnnnnnnnnnnnnnnnnnnnnnnnnnnnnnnnnnnnnnnnnnnnnnnnnnnnnnnnnnnnnnnnnnnnnnnnnnnnnnnnnnnnnnnnnnnnnnnnnnnnnnnnnnnnnnnnnnnnnnnnnnnnnnnnnnnnnnnnnnnnnnnnnnnnnnnnnnnnnnnnnnnnnnnnnnnnnnnnnnnnnnnnnnnnnnnnnnnnnnnnnnnnnnnnnnnnnnnnnnnnnnnnnnnnnnnnnnnnnnnnnnnnnnnnnnnnnnnnnnnnnnnnnnnnnnnnnnnnnnnnnnnnnnnnnnnnnnnnnnnnnnnnnnnnnnnnnnnnnnnnnnnnnnnnnnnnnnnnnnnnnnnnnnnnnnnnnnnnnnnnnnnnnnnnnnnnnnnnnnnnnnnnnnnnnnnnnnnnnnnnnnnnnnnnnnnnnnnnnnnnnnnnnnnnnnnnnnnnnnnnnnnnnnnnnnnnnnnnnnnnnnnnnnnnnnnnnnnnnnnnnnnnnnnnnnnnnnnnnnnnnnnnnnnnnnnnnnnnnnnnnnnnnnnnnnnnnnnnnnnnnnnnnnnnnnnnnnnnnnnnnnnnnnnnnnnnnnnnnnnnnnnnnnnnnnnnnnnnnnnnnnnnnnnnnnnnnnnnnnnnnnnnnnnnnnnnnnnnnnnnnnnnnnnnnnnnnnnnnnnnnnnnnnnnnnnnnnnnnnnnnnnnnnnnnnnnnnnnnnnnnnnnnnnnnnnnnnnnnnnnnnnnnnnnnnnnnnnnnnnnnnnnnnnnnnnnnnnnnnnnnnnnnnnnnnnnnnnnnnnnnnnnnnnnnnnnnnnnnnnnnnnnnnnnnnnnnnnnnnnnnnnnnnnnnnnnnnnnnnnnnnnnnnnnnnnnnnnnnnnnnnnnnnnnnnnnnnnnnnnnnnnnnnnnnnnnnnnnnnnnnnnnnnnnnnnnnnnnnnnnnnnnnnnnnnnnnnnnnnnnnnnnnnnnnnnnnnnnnnnnnnnnnnnnnnnnnnnnnnnnnnnnnnnnnnnnnnnnnnnnnnnnnnnnnnnnnnnnnnnnnnnnnnnnnnnnnnnnnnnnnnnnnnnnnnnnnnnnnnnnnnnnnnnnnnnnnnnnnnnnnnnnnnnnnnnnnnnnnnnnnnnnnnnnnnnnnnnnnnnnnnnnnnnnnnnnnnnnnnnnnnnnnnnnnnnnnnnnnnnnnnnnnnnnnnnnnnnnnnnnnnnnnnnnnnnnnnnnnnnnnnnnnnnnnnnnnnnnnnnnnnnnnnnnnnnnnnnnnnnnnnnnnnnnnnnnnnnnnnnnnnnnnnnnnnnnnnnnnnnnnnnnnnnnnnnnnnnnnnnnnnnnnnnnnnnnnnnnnnnnnnnnnnnnnnnnnnnnnnnnnnnnnnnnnnnnnnnnnnnnnnnnnnnnnnnnnnnnnnnnnnnnnnnnnnnnnnnnnnnnnnnnnnnnnnnnnnnnnnnnnnnnnnnnnnnnnnnnnnnnnnnnnnnnnnnnnnnnnnnnnnnnnnnnnnnnnnnnnnnnnnnnnnnnnnnnnnnnnnnnnnnnnnnnnnnnnnnnnnnnnnnnnnnnnnnnnnnnnnnnnnnnnnnnnnnnnnnnnnnnnnnnnnnnnnnnnnnnnnnnnnnnnnnnnnnnnnnnnnnnnnnnnnnnnnnnnnnnnnnnnnnnnnnnnnnnnnnnnnnnnnnnnnnnnnnnnnnnnnnnnnnnnnnnnnnnnnnnnnnnnnnnnnnnnnnnnnnnnnnnnnnnnnnnnnnnnnnnnnnnnnnnnnnnnnnnnnnnnnnnnnnnnnnnnnnnnnnnnnnnnnnnnnnnnnnnnnnnnnnnnnnnnnnnnnnnnnnnnnnnnnnnnnnnnnnnnnnnnnnnnnnnnnnnnnnnnnnnnnnnnnnnnnnnnnnnnnnnnnnnnnnnnnnnnnnnnnnnnnnnnnnnnnnnnnnnnnnnnnnnnnnnnnnnnnnnnnnnnnnnnnnnnnnnnnnnnnnnnnnnnnnnnnnnnnnnnnnnnnnnnnnnnnnnnnnnnnnnnnnnnnnnnnnnnnnnnnnnnnnnnnnnnnnnnnnnnnnnnnnnnnnnnnnnnnnnnnnnnnnnnnnnnnnnnnnnnnnnnnnnnnnnnnnnnnnnnnnnnnnnnnnnnnnnnnnnnnnnnnnnnnnnnnnnnnnnnnnnnnnnnnnnnnnnnnnnnnnnnnnnnnnnnnnnnnnnnnnnnnnnnnnnnnnnnnnnnnnnnnnnnnnnnnnnnnnnnnnnnnnnnnnnnnnnnnnnnnnnnnnnnnnnnnnnnnnnnnnnnnnnnnnnnnnnnnnnnnnnnnnnnnnnnnnnnnnnnnnnnnnnnnnnnnnnnnnnnnnnnnnnnnnnnnnnnnnnnnnnnnnnnnnnnnnnnnnnnnnnnnnnnnnnnnnnnnnnnnnnnnnnnnnnnnnnnnnnnnnnnnnnnnnnnnnnnnnnnnnnnnnnnnnnnnnnnnnnnnnnnnnnnnnnnnnnnnnnnnnnnnnnnnnnnnnnnnnnnnnnnnnnnnnnnnnnnnnnnnnnnnnnnnnnnnnnnnnnnnnnnnnnnnnnnnnnnnnnnnnnnnnnnnnnnnnnnnnnnnnnnnnnnnnnnnnnnnnnnnnnnnnnnnnnnnnnnnnnnnnnnnnnnnnnnnnnnnnnnnnnnnnnnnnnnnnnnnnnnnnnnnnnnnnnnnnnnnnnnnnnnnnnnnnnnnnnnnnnnnnnnnnnnnnnnnnnnnnnnnnnnnnnnnnnnnnnnnnnnnnnnnnnnnnnnnnnnnnnnnnnnnnnnnnnnnnnnnnnnnnnnnnnnnnnnnnnnnnnnnnnnnnnnnnnnnnnnnnnnnnnnnnnnnnnnnnnnnnnnnnnnnnnnnnnnnnnnnnnnnnnnnnnnnnnnnnnnnnnnnnnnnnnnnnnnnnnnnnnnnnnnnnnnnnnnnnnnnnnnnnnnnnnnnnnnnnnnnnnnnnnnnnnnnnnnnnnnnnnnnnnnnnnnnnnnnnnnnnnnnnnnnnnnnnnnnnnnnnnnnnnnnnnnnnnnnnnnnnnnnnnnnnnnnnnnnnnnnnnnnnnnnnnnnnnnnnnnnnnnnnnnnnnnnnnnnnnnnnnnnnnnnnnnnnnnnnnnnnnnnnnnnnnnnnnnnnnnnnnnnnnnnnnnnnnnnnnnnnnnnnnnnnnnnnnnnnnnnnnnnnnnnnnnnnnnnnnnnnnnnnnnnnnnnnnnnnnnnnnnnnnnnnnnnnnnnnnnnnnnnnnnnnnnnnnnnnnnnnnnnnnnnnnnnnnnnnnnnnnnnnnnnnnnnnnnnnnnnnnnnnnnnnnnnnnnnnnnnnnnnnnnnnnnnnnnnnnnnnnnnnnnnnnnnnnnnnnnnnnnnnnnnnnnnnnnnnnnnnnnnnnnnnnnnnnnnnnnnnnnnnnnnnnnnnnnnnnnnnnnnnnnnnnnnnnnnnnnnnnnnnnnnnnnnnnnnnnnnnnnnnnnnnnnnnnnnnnnnnnnnnnnnnnnnnnnnnnnnnnnnnnnnnnnnnnnnnnnnnnnnnnnnnnnnnnnnnnnnnnnnnnnnnnnnnnnnnnnnnnnnnnnnnnnnnnnnnnnnnnnnnnnnnnnnnnnnnnnnnnnnnnnnnnnnnnnnnnnnnnnnnnnnnnnnnnnnnnnnnnnnnnnnnnnnnnnnnnnnnnnnnnnnnnnnnnnnnnnnnnnnnnnnnnnnnnnnnnnnnnnnnnnnnnnnnnnnnnnnnnnnnnnnnnnnnnnnnnnnnnnnnnnnnnnnnnnnnnnnnnnnnnnnnnnnnnnnnnnnnnnnnnnnnnnnnnnnnnnnnnnnnnnnnnnnnnnnnnnnnnnnnnnnnnnnnnnnnnnnnnnnnnnnnnnnnnnnnnnnnnnnnnnnnnnnnnnnnnnnnnnnnnnnnnnnnnnnnnnnnnnnnnnnnnnnnnnnnnnnnnnnnnnnnnnnnnnnnnnnnnnnnnnnnnnnnnnnnnnnnnnnnnnnnnnnnnnnnnnnnnnnnnnnnnnnnnnnnnnnnnnnnnnnnnnnnnnnnnnnnnnnnnnnnnnnnnnnnnnnnnnnnnnnnnnnnnnnnnnnnnnnnnnnnnnnnnnnnnnnnnnnnnnnnnnnnnnnnnnnnnnnnnnnnnnnnnnnnnnnnnnnnnnnnnnnnnnnnnnnnnnnnnnnnnnnnnnnnnnnnnnnnnnnnnnnnnnnnnnnnnnnnnnnnnnnnnnnnnnnnnnnnnnnnnnnnnnnnnnnnnnnnnnnnnnnnnnnnnnnnnnnnnnnnnnnnnnnnnnnnnnnnnnnnnnnnnnnnnnnnnnnnnnnnnnnnnnnnnnnnnnnnnnnnnnnnnnnnnnnnnnnnnnnnnnnnnnnnnnnnnnnnnnnnnnnnnnnnnnnnnnnnnnnnnnnnnnnnnnnnnnnnnnnnnnnnnnnnnnnnnnnnnnnnnnnnnnnnnnnnnnnnnnnnnnnnnnnnnnnnnnnnnnnnnnnnnnnnnnnnnnnnnnnnnnnnnnnnnnnnnnnnnnnnnnnnnnnnnnnnnnnnnnnnnnnnnnnnnnnnnnnnnnnnnnnnnnnnnnnnnnnnnnnnnnnnnnnnnnnnnnnnnnnnnnnnnnnnnnnnnnnnnnnnnnnnnnnnnnnnnnnnnnnnnnnnnnnnnnnnnnnnnnnnnnnnnnnnnnnnnnnnnnnnnnnnnnnnnnnnnnnnnnnnnnnnnnnnnnnnnnnnnnnnnnnnnnnnnnnnnnnnnnnnnnnnnnnnnnnnnnnnnnnnnnnnnnnnnnnnnnnnnnnnnnnnnnnnnnnnnnnnnnnnnnnnnnnnnnnnnnnnnnnnnnnnnnnnnnnnnnnnnnnnnnnnnnnnnnnnnnnnnnnnnnnnnnnnnnnnnnnnnnnnnnnnnnnnnnnnnnnnnnnnnnnnnnnnnnnnnnnnnnnnnnnnnnnnnnnnnnnnnnnnnnnnnnnnnnnnnnnnnnnnnnnnnnnnnnnnnnnnnnnnnnnnnnnnnnnnnnnnnnnnnnnnnnnnnnnnnnnnnnnnnnnnnnnnnnnnnnnnnnnnnnnnnnnnnnnnnnnnnnnnnnnnnnnnnnnnnnnnnnnnnnnnnnnnnnnnnnnnnnnnnnnnnnnnnnnnnnnnnnnnnnnnnnnnnnnnnnnnnnnnnnnnnnnnnnnnnnnnnnnnnnnnnnnnnnnnnnnnnnnnnnnnnnnnnnnnnnnnnnnnnnnnnnnnnnnnnnnnnnnnnnnnnnnnnnnnnnnnnnnnnnnnnnnnnnnnnnnnnnnnnnnnnnnnnnnnnnnnnnnnnnnnnnnnnnnnnnnnnnnnnnnnnnnnnnnnnnnnnnnnnnnnnnnnnnnnnnnnnnnnnnnnnnnnnnnnnnnnnnnnnnnnnnnnnnnnnnnnnnnnnnnnnnnnnnnnnnnnnnnnnnnnnnnnnnnnnnnnnnnnnnnnnnnnnnnnnnnnnnnnnnnnnnnnnnnnnnnnnnnnnnnnnnnnnnnnnnnnnnnnnnnnnnnnnnnnnnnnnnnnnnnnnnnnnnnnnnnnnnnnnnnnnnnnnnnnnnnnnnnnnnnnnnnnnnnnnnnnnnnnnnnnnnnnnnnnnnnnnnnnnnnnnnnnnnnnnnnnnnnnnnnnnnnnnnnnnnnnnnnnnnnnnnnnnnnnnnnnnnnnnnnnnnnnnnnnnnnnnnnnnnnnnnnnnnnnnnnnnnnnnnnnnnnnnnnnnnnnnnnnnnnnnnnnnnnnnnnnnnnnnnnnnnnnnnnnnnnnnnnnnnnnnnnnnnnnnnnnnnnnnnnnnnnnnnnnnnnnnnnnnnnnnnnnnnnnnnnnnnnnnnnnnnnnnnnnnnnnnnnnnnnnnnnnnnnnnnnnnnnnnnnnnnnnnnnnnnnnnnnnnnnnnnnnnnnnnnnnnnnnnnnnnnnnnnnnnnnnnnnnnnnnnnnnnnnnnnnnnnnnnnnnnnnnnnnnnnnnnnnnnnnnnnnnnnnnnnnnnnnnnnnnnnnnnnnnnnnnnnnnnnnnnnnnnnnnnnnnnnnnnnnnnnnnnnnnnnnnnnnnnnnnnnnnnnnnnnnnnnnnnnnnnnnnnnnnnnnnnnnnnnnnnnnnnnnnnnnnnnnnnnnnnnnnnnnnnnnnnnnnnnnnnnnnnnnnnnnnnnnnnnnnnnnnnnnnnnnnnnnnnnnnnnnnnnnnnnnnnnnnnnnnnnnnnnnnnnnnnnnnnnnnnnnnnnnnnnnnnnnnnnnnnnnnnnnnnnnnnnnnnnnnnnnnnnnnnnnnnnnnnnnnnnnnnnnnnnnnnnnnnnnnnnnnnnnnnnnnnnnnnnnnnnnnnnnnnnnnnnnnnnnnnnnnnnnnnnnnnnnnnnnnnnnnnnnnnnnnnnnnnnnnnnnnnnnnnnnnnnnnnnnnnnnnnnnnnnnnnnnnnnnnnnnnnnnnnnnnnnnnnnnnnnnnnnnnnnnnnnnnnnnnnnnnnnnnnnnnnnnnnnnnnnnnnnnnnnnnnnnnnnnnnnnnnnnnnnnnnnnnnnnnnnnnnnnnnnnnnnnnnnnnnnnnnnnnnnnnnnnnnnnnnnnnnnnnnnnnnnnnnnnnnnnnnnnnnnnnnnnnnnnnnnnnnnnnnnnnnnnnnnnnnnnnnnnnnnnnnnnnnnnnnnnnnnnnnnnnnnnnnnnnnnnnnnnnnnnnnnnnnnnnnnnnnnnnnnnnnnnnnnnnnnnnnnnnnnnnnnnnnnnnnnnnnnnnnnnnnnnnnnnnnnnnnnnnnnnnnnnnnnnnnnnnnnnnnnnnnnnnnnnnnnnnnnnnnnnnnnnnnnnnnnnnnnnnnnnnnnnnnnnnnnnnnnnnnnnnnnnnnnnnnnnnnnnnnnnnnnnnnnnnnnnnnnnnnnnnnnnnnnnnnnnnnnnnnnnnnnnnnnnnnnnnnnnnnnnnnnnnnnnnnnnnnnnnnnnnnnnnnnnnnnnnnnnnnnnnnnnnnnnnnnnnnnnnnnnnnnnnnnnnnnnnnnnnnnnnnnnnnnnnnnnnnnnnnnnnnnnnnnnnnnnnnnnnnnnnnnnnnnnnnnnnnnnnnnnnnnnnnnnnnnnnnnnnnnnnnnnnnnnnnnnnnnnnnnnnnnnnnnnnnnnnnnnnnnnnnnnnnnnnnnnnnnnnnnnnnnnnnnnnnnnnnnnnnnnnnnnnnnnnnnnnnnnnnnnnnnnnnnnnnnnnnnnnnnnnnnnnnnnnnnnnnnnnnnnnnnnnnnnnnnnnnnnnnnnnnnnnnnnnnnnnnnnnnnnnnnnnnnnnnnnnnnnnnnnnnnnnnnnnnnnnnnnnnnnnnnnnnnnnnnnnnnnnnnnnnnnnnnnnnnnnnnnnnnnnnnnnnnnnnnnnnnnnnnnnnnnnnnnnnnnnnnnnnnnnnnnnnnnnnnnnnnnnnnnnnnnnnnnnnnnnnnnnnnnnnnnnnnnnnnnnnnnnnnnnnnnnnnnnnnnnnnnnnnnnnnnnnnnnnnnnnnnnnnnnnnnnnnnnnnnnnnnnnnnnnnnnnnnnnnnnnnnnnnnnnnnnnnnnnnnnnnnnnnnnnnnnnnnnnnnnnnnnnnnnnnnnnnnnnnnnnnnnnnnnnnnnnnnnnnnnnnnnnnnnnnnnnnnnnnnnnnnnnnnnnnnnnnnnnnnnnnnnnnnnnnnnnnnnnnnnnnnnnnnnnnnnnnnnnnnnnnnnnnnnnnnnnnnnnnnnnnnnnnnnnnnnnnnnnnnnnnnnnnnnnnnnnnnnnnnnnnnnnnnnnnnnnnnnnnnnnnnnnnnnnnnnnnnnnnnnnnnnnnnnnnnnnnnnnnnnnnnnnnnnnnnnnnnnnnnnnnnnnnnnnnnnnnnnnnnnnnnnnnnnnnnnnnnnnnnnnnnnnnnnnnnnnnnnnnnnnnnnnnnnnnnnnnnnnnnnnnnnnnnnnnnnnnnnnnnnnnnnnnnnnnnnnnnnnnnnnnnnnnnnnnnnnnnnnnnnnnnnnnnnnnnnnnnnnnnnnnnnnnnnnnnnnnnnnnnnnnnnnnnnnnnnnnnnnnnnnnnnnnnnnnnnnnnnnnnnnnnnnnnnnnnnnnnnnnnnnnnnnnnnnnnnnnnnnnnnnnnnnnnnnnnnnnnnnnnnnnnnnnnnnnnnnnnnnnnnnnnnnnnnnnnnnnnnnnnnnnnnnnnnnnnnnnnnnnnnnnnnnnnnnnnnnnnnnnnnnnnnnnnnnnnnnnnnnnnnnnnnnnnnnnnnnnnnnnnnnnnnnnnnnnnnnnnnnnnnnnnnnnnnnnnnnnnnnnnnnnnnnnnnnnnnnnnnnnnnnnnnnnnnnnnnnnnnnnnnnnnnnnnnnnnnnnnnnnnnnnnnnnnnnnnnnnnnnnnnnnnnnnnnnnnnnnnnnnnnnnnnnnnnnnnnnnnnnnnnnnnnnnnnnnnnnnnnnnnnnnnnnnnnnnnnnnnnnnnnnnnnnnnnnnnnnnnnnnnnnnnnnnnnnnnnnnnnnnnnnnnnnnnnnnnnnnnnnnnnnnnnnnnnnnnnnnnnnnnnnnnnnnnnnnnnnnnnnnnnnnnnnnnnnnnnnnnnnnnnnnnnnnnnnnnnnnnnnnnnnnnnnnnnnnnnnnnnnnnnnnnnnnnnnnnnnnnnnnnnnnnnnnnnnnnnnnnnnnnnnnnnnnnnnnnnnnnnnnnnnnnnnnnnnnnnnnnnnnnnnnnnnnnnnnnnnnnnnnnnnnnnnnnnnnnnnnnnnnnnnnnnnnnnnnnnnnnnnnnnnnnnnnnnnnnnnnnnnnnnnnnnnnnnnnnnnnnnnnnnnnnnnnnnnnnnnnnnnnnnnnnnnnnnnnnnnnnnnnnnnnnnnnnnnnnnnnnnnnnnnnnnnnnnnnnnnnnnnnnnnnnnnnnnnnnnnnnnnnnnnnnnnnnnnnnnnnnnnnnnnnnnnnnnnnnnnnnnnnnnnnnnnnnnnnnnnnnnnnnnnnnnnnnnnnnnnnnnnnnnnnnnnnnnnnnnnnnnnnnnnnnnnnnnnnnnnnnnnnnnnnnnnnnnnnnnnnnnnnnnnnnnnnnnnnnnnnnnnnnnnnnnnnnnnnnnnnnnnnnnnnnnnnnnnnnnnnnnnnnnnnnnnnnnnnnnnnnnnnnnnnnnnnnnnnnnnnnnnnnnnnnnnnnnnnnnnnnnnnnnnnnnnnnnnnnnnnnnnnnnnnnnnnnnnnnnnnnnnnnnnnnnnnnnnnnnnnnnnnnnnnnnnnnnnnnnnnnnnnnnnnnnnnnnnnnnnnnnnnnnnnnnnnnnnnnnnnnnnnnnnnnnnnnnnnnnnnnnnnnnnnnnnnnnnnnnnnnnnnnnnnnnnnnnnnnnnnnnnnnnnnnnnnnnnnnnnnnnnnnnnnnnnnnnnnnnnnnnnnnnnnnnnnnnnnnnnnnnnnnnnnnnnnnnnnnnnnnnnnnnnnnnnnnnnnnnnnnnnnnnnnnnnnnnnnnnnnnnnnnnnnnnnnnnnnnnnnnnnnnnnnnnnnnnnnnnnnnnnnnnnnnnnnnnnnnnnnnnnnnnnnnnnnnnnnnnnnnnnnnnnnnnnnnnnnnnnnnnnnnnnnnnnnnnnnnnnnnnnnnnnnnnnnnnnnnnnnnnnnnnnnnnnnnnnnnnnnnnnnnnnnnnnnnnnnnnnnnnnnnnnnnnnnnnnnnnnnnnnnnnnnnnnnnnnnnnnnnnnnnnnnnnnnnnnnnnnnnnnnnnnnnnnnnnnnnnnnnnnnnnnnnnnnnnnnnnnnnnnnnnnnnnnnnnnnnnnnnnnnnnnnnnnnnnnnnnnnnnnnnnnnnnnnnnnnnnnnnnnnnnnnnnnnnnnnnnnnnnnnnnnnnnnnnnnnnnnnnnnnnnnnnnnnnnnnnnnnnnnnnnnnnnnnnnnnnnnnnnnnnnnnnnnnnnnnnnnnnnnnnnnnnnnnnnnnnnnnnnnnnnnnnnnnnnnnnnnnnnnnnnnnnnnnnnnnnnnnnnnnnnnnnnnnnnnnnnnnnnnnnnnnnnnnnnnnnnnnnnnnnnnnnnnnnnnnnnnnnnnnnnnnnnnnnnnnnnnnnnnnnnnnnnnnnnnnnnnnnnnnnnnnnnnnnnnnnnnnnnnnnnnnnnnnnnnnnnnnnnnnnnnnnnnnnnnnnnnnnnnnnnnnnnnnnnnnnnnnnnnnnnnnnnnnnnnnnnnnnnnnnnnnnnnnnnnnnnnnnnnnnnnnnnnnnnnnnnnnnnnnnnnnnnnnnnnnnnnnnnnnnnnnnnnnnnnnnnnnnnnnnnnnnnnnnnnnnnnnnnnnnnnnnnnnnnnnnnnnnnnnnnnnnnnnnnnnnnnnnnnnnnnnnnnnnnnnnnnnnnnnnnnnnnnnnnnnnnnnnnnnnnnnnnnnnnnnnnnnnnnnnnnnnnnnnnnnnnnnnnnnnnnnnnnnnnnnnnnnnnnnnnnnnnnnnnnnnnnnnnnnnnnnnnnnnnnnnnnnnnnnnnnnnnnnnnnnnnnnnnnnnnnnnnnnnnnnnnnnnnnnnnnnnnnnnnnnnnnnnnnnnnnnnnnnnnnnnnnnnnnnnnnnnnnnnnnnnnnnnnnnnnnnnnnnnnnnnnnnnnnnnnnnnnnnnnnnnnnnnnnnnnnnnnnnnnnnnnnnnnnnnnnnnnnnnnnnnnnnnnnnnnnnnnnnnnnnnnnnnnnnnnnnnnnnnnnnnnnnnnnnnnnnnnnnnnnnnnnnnnnnnnnnnnnnnnnnnnnnnnnnnnnnnnnnnnnnnnnnnnnnnnnnnnnnnnnnnnnnnnnnnnnnnnnnnnnnnnnnnnnnnnnnnnnnnnnnnnnnnnnnnnnnnnnnnnnnnnnnnnnnnnnnnnnnnnnnnnnnnnnnnnnnnnnnnnnnnnnnnnnnnnnnnnnnnnnnnnnnnnnnnnnnnnnnnnnnnnnnnnnnnnnnnnnnnnnnnnnnnnnnnnnnnnnnnnnnnnnnnnnnnnnnnnnnnnnnnnnnnnnnnnnnnnnnnnnnnnnnnnnnnnnnnnnnnnnnnnnnnnnnnnnnnnnnnnnnnnnnnnnnnnnnnnnnnnnnnnnnnnnnnnnnnnnnnnnnnnnnnnnnnnnnnnnnnnnnnnnnnnnnnnnnnnnnnnnnnnnnnnnnnnnnnnnnnnnnnnnnnnnnnnnnnnnnnnnnnnnnnnnnnnnnnnnnnnnnnnnnnnnnnnnnnnnnnnnnnnnnnnnnnnnnnnnnnnnnnnnnnnnnnnnnnnnnnnnnnnnnnnnnnnnnnnnnnnnnnnnnnnnnnnnnnnnnnnnnnnnnnnnnnnnnnnnnnnnnnnnnnnnnnnnnnnnnnnnnnnnnnnnnnnnnnnnnnnnnnnnnnnnnnnnnnnnnnnnnnnnnnnnnnnnnnnnnnnnnnnnnnnnnnnnnnnnnnnnnnnnnnnnnnnnnnnnnnnnnnnnnnnnnnnnnnnnnnnnnnnnnnnnnnnnnnnnnnnnnnnnnnnnnnnnnnnnnnnnnnnnnnnnnnnnnnnnnnnnnnnnnnnnnnnnnnnnnnnnnnnnnnnnnnnnnnnnnnnnnnnnnnnnnnnnnnnnnnnnnnnnnnnnnnnnnnnnnnnnnnnnnnnnnnnnnnnnnnnnnnnnnnnnnnnnnnnnnnnnnnnnnnnnnnnnnnnnnnnnnnnnnnnnnnnnnnnnnnnnnnnnnnnnnnnnnnnnnnnnnnnnnnnnnnnnnnnnnnnnnnnnnnnnnnnnnnnnnnnnnnnnnnnnnnnnnnnnnnnnnnnnnnnnnnnnnnnnnnnnnnnnnnnnnnnnnnnnnnnnnnnnnnnnnnnnnnnnnnnnnnnnnnnnnnnnnnnnnnnnnnnnnnnnnnnnnnnnnnnnnnnnnnnnnnnnnnnnnnnnnnnnnnnnnnnnnnnnnnnnnnnnnnnnnnnnnnnnnnnnnnnnnnnnnnnnnnnnnnnnnnnnnnnnnnnnnnnnnnnnnnnnnnnnnnnnnnnnnnnnnnnnnnnnnnnnnnnnnnnnnnnnnnnnnnnnnnnnnnnnnnnnnnnnnnnnnnnnnnnnnnnnnnnnnnnnnnnnnnnnnnnnnnnnnnnnnnnnnnnnnnnnnnnnnnnnnnnnnnnnnnnnnnnnnnnnnnnnnnnnnnnnnnnnnnnnnnnnnnnnnnnnnnnnnnnnnnnnnnnnnnnnnnnnnnnnnnnnnnnnnnnnnnnnnnnnnnnnnnnnnnnnnnnnnnnnnnnnnnnnnnnnnnnnnnnnnnnnnnnnnnnnnnnnnnnnnnnnnnnnnnnnnnnnnnnnnnnnnnnnnnnnnnnnnnnnnnnnnnnnnnnnnnnnnnnnnnnnnnnnnnnnnnnnnnnnnnnnnnnnnnnnnnnnnnnnnnnnnnnnnnnnnnnnnnnnnnnnnnnnnnnnnnnnnnnnnnnnnnnnnnnnnnnnnnnnnnnnnnnnnnnnnnnnnnnnnnnnnnnnnnnnnnnnnnnnnnnnnnnnnnnnnnnnnnnnnnnnnnnnnnnnnnnnnnnnnnnnnnnnnnnnnnnnnnnnnnnnnnnnnnnnnnnnnnnnnnnnnnnnnnnnnnnnnnnnnnnnnnnnnnnnnnnnnnnnnnnnnnnnnnnnnnnnnnnnnnnnnnnnnnnnnnnnnnnnnnnnnnnnnnnnnnnnnnnnnnnnnnnnnnnnnnnnnnnnnnnnnnnnnnnnnnnnnnnnnnnnnnnnnnnnnnnnnnnnnnnnnnnnnnnnnnnnnnnnnnnnnnnnnnnnnnnnnnnnnnnnnnnnnnnnnnnnnnnnnnnnnnnnnnnnnnnnnnnnnnnnnnnnnnnnnnnnnnnnnnnnnnnnnnnnnnnnnnnnnnnnnnnnnnnnnnnnnnnnnnnnnnnnnnnnnnnnnnnnnnnnnnnnnnnnnnnnnnnnnnnnnnnnnnnnnnnnnnnnnnnnnnnnnnnnnnnnnnnnnnnnnnnnnnnnnnnnnnnnnnnnnnnnnnnnnnnnnnnnnnnnnnnnnnnnnnnnnnnnnnnnnnnnnnnnnnnnnnnnnnnnnnnnnnnnnnnnnnnnnnnnnnnnnnnnnnnnnnnnnnnnnnnnnnnnnnnnnnnnnnnnnnnnnnnnnnnnnnnnnnnnnnnnnnnnnnnnnnnnnnnnnnnnnnnnnnnnnnnnnnnnnnnnnnnnnnnnnnnnnnnnnnnnnnnnnnnnnnnnnnnnnnnnnnnnnnnnnnnnnnnnnnnnnnnnnnnnnnnnnnnnnnnnnnnnnnnnnnnnnnnnnnnnnnnnnnnnnnnnnnnnnnnnnnnnnnnnnnnnnnnnnnnnnnnnnnnnnnnnnnnnnnnnnnnnnnnnnnnnnnnnnnnnnnnnnnnnnnnnnnnnnnnnnnnnnnnnnnnnnnnnnnnnnnnnnnnnnnnnnnnnnnnnnnnnnnnnnnnnnnnnnnnnnnnnnnnnnnnnnnnnnnnnnnnnnnnnnnnnnnnnnnnnnnnnnnnnnnnnnnnnnnnnnnnnnnnnnnnnnnnnnnnnnnnnnnnnnnnnnnnnnnnnnnnnnnnnnnnnnnnnnnnnnnnnnnnnnnnnnnnnnnnnnnnnnnnnnnnnnnnnnnnnnnnnnnnnnnnnnnnnnnnnnnnnnnnnnnnnnnnnnnnnnnnnnnnnnnnnnnnnnnnnnnnnnnnnnnnnnnnnnnnnnnnnnnnnnnnnnnnnnnnnnnnnnnnnnnnnnnnnnnnnnnnnnnnnnnnnnnnnnnnnnnnnnnnnnnnnnnnnnnnnnnnnnnnnnnnnnnnnnnnnnnnnnnnnnnnnnnnnnnnnnnnnnnnnnnnnnnnnnnnnnnnnnnnnnnnnnnnnnnnnnnnnnnnnnnnnnnnnnnnnnnnnnnnnnnnnnnnnnnnnnnnnnnnnnnnnnnnnnnnnnnnnnnnnnnnnnnnnnnnnnnnnnnnnnnnnnnnnnnnnnnnnnnnnnnnnnnnnnnnnnnnnnnnnnnnnnnnnnnnnnnnnnnnnnnnnnnnnnnnnnnnnnnnnnnnnnnnnnnnnnnnnnnnnnnnnnnnnnnnnnnnnnnnnnnnnnnnnnnnnnnnnnnnnnnnnnnnnnnnnnnnnnnnnnnnnnnnnnnnnnnnnnnnnnnnnnnnnnnnnnnnnnnnnnnnnnnnnnnnnnnnnnnnnnnnnnnnnnnnnnnnnnnnnnnnnnnnnnnnnnnnnnnnnnnnnnnnnnnnnnnnnnnnnnnnnnnnnnnnnnnnnnnnnnnnnnnnnnnnnnnnnnnnnnnnnnnnnnnnnnnnnnnnnnnnnnnnnnnnnnnnnnnnnnnnnnnnnnnnnnnnnnnnnnnnnnnnnnnnnnnnnnnnnnnnnnnnnnnnnnnnnnnnnnnnnnnnnnnnnnnnnnnnnnnnnnnnnnnnnnnnnnnnnnnnnnnnnnnnnnnnnnnnnnnnnnnnnnnnnnnnnnnnnnnnnnnnnnnnnnnnnnnnnnnnnnnnnnnnnnnnnnnnnnnnnnnnnnnnnnnnnnnnnnnnnnnnnnnnnnnnnnnnnnnnnnnnnnnnnnnnnnnnnnnnnnnnnnnnnnnnnnnnnnnnnnnnnnnnnnnnnnnnnnnnnnnnnnnnnnnnnnnnnnnnnnnnnnnnnnnnnnnnnnnnnnnnnnnnnnnnnnnnnnnnnnnnnnnnnnnnnnnnnnnnnnnnnnnnnnnnnnnnnnnnnnnnnnnnnnnnnnnnnnnnnnnnnnnnnnnnnnnnnnnnnnnnnnnnnnnnnnnnnnnnnnnnnnnnnnnnnnnnnnnnnnnnnnnnnnnnnnnnnnnnnnnnnnnnnnnnnnnnnnnnnnnnnnnnnnnnnnnnnnnnnnnnnnnnnnnnnnnnnnnnnnnnnnnnnnnnnnnnnnnnnnnnnnnnnnnnnnnnnnnnnnnnnnnnnnnnnnnnnnnnnnnnnnnnnnnnnnnnnnnnnnnnnnnnnnnnnnnnnnnnnnnnnnnnnnnnnnnnnnnnnnnnnnnnnnnnnnnnnnnnnnnnnnnnnnnnnnnnnnnnnnnnnnnnnnnnnnnnnnnnnnnnnnnnnnnnnnnnnnnnnnnnnnnnnnnnnnnnnnnnnnnnnnnnnnnnnnnnnnnnnnnnnnnnnnnnnnnnnnnnnnnnnnnnnnnnnnnnnnnnnnnnnnnnnnnnnnnnnnnnnnnnnnnnnnnnnnnnnnnnnnnnnnnnnnnnnnnnnnnnnnnnnnnnnnnnnnnnnnnnnnnnnnnnnnnnnnnnnnnnnnnnnnnnnnnnnnnnnnnnnnnnnnnnnnnnnnnnnnnnnnnnnnnnnnnnnnnnnnnnnnnnnnnnnnnnnnnnnnnnnnnnnnnnnnnnnnnnnnnnnnnnnnnnnnnnnnnnnnnnnnnnnnnnnnnnnnnnnnnnnnnnnnnnnnnnnnnnnnnnnnnnnnnnnnnnnnnnnnnnnnnnnnnnnnnnnnnnnnnnnnnnnnnnnnnnnnnnnnnnnnnnnnnnnnnnnnnnnnnnnnnnnnnnnnnnnnnnnnnnnnnnnnnnnnnnnnnnnnnnnnnnnnnnnnnnnnnnnnnnnnnnnnnnnnnnnnnnnnnnnnnnnnnnnnnnnnnnnnnnnnnnnnnnnnnnnnnnnnnnnnnnnnnnnnnnnnnnnnnnnnnnnnnnnnnnnnnnnnnnnnnnnnnnnnnnnnnnnnnnnnnnnnnnnnnnnnnnnnnnnnnnnnnnnnnnnnnnnnnnnnnnnnnnnnnnnnnnnnnnnnnnnnnnnnnnnnnnnnnnnnnnnnnnnnnnnnnnnnnnnnnnnnnnnnnnnnnnnnnnnnnnnnnnnnnnnnnnnnnnnnnnnnnnnnnnnnnnnnnnnnnnnnnnnnnnnnnnnnnnnnnnnnnnnnnnnnnnnnnnnnnnnnnnnnnnnnnnnnnnnnnnnnnnnnnnnnnnnnnnnnnnnnnnnnnnnnnnnnnnnnnnnnnnnnnnnnnnnnnnnnnnnnnnnnnnnnnnnnnnnnnnnnnnnnnnnnnnnnnnnnnnnnnnnnnnnnnnnnnnnnnnnnnnnnnnnnnnnnnnnnnnnnnnnnnnnnnnnnnnnnnnnnnnnnnnnnnnnnnnnnnnnnnnnnnnnnnnnnnnnnnnnnnnnnnnnnnnnnnnnnnnnnnnnnnnnnnnnnnnnnnnnnnnnnnnnnnnnnnnnnnnnnnnnnnnnnnnnnnnnnnnnnnnnnnnnnnnnnnnnnnnnnnnnnnnnnnnnnnnnnnnnnnnnnnnnnnnnnnnnnnnnnnnnnnnnnnnnnnnnnnnnnnnnnnnnnnnnnnnnnnnnnnnnnnnnnnnnnnnnnnnnnnnnnnnnnnnnnnnnnnnnnnnnnnnnnnnnnnnnnnnnnnnnnnnnnnnnnnnnnnnnnnnnnnnnnnnnnnnnnnnnnnnnnnnnnnnnnnnnnnnnnnnnnnnnnnnnnnnnnnnnnnnnnnnnnnnnnnnnnnnnnnnnnnnnnnnnnnnnnnnnnnnnnnnnnnnnnnnnnnnnnnnnnnnnnnnnnnnnnnnnnnnnnnnnnnnnnnnnnnnnnnnnnnnnnnnnnnnnnnnnnnnnnnnnnnnnnnnnnnnnnnnnnnnnnnnnnnnnnnnnnnnnnnnnnnnnnnnnnnnnnnnnnnnnnnnnnnnnnnnnnnnnnnnnnnnnnnnnnnnnnnnnnnnnnnnnnnnnnnnnnnnnnnnnnnnnnnnnnnnnnnnnnnnnnnnnnnnnnnnnnnnnnnnnnnnnnnnnnnnnnnnnnnnnnnnnnnnnnnnnnnnnnnnnnnnnnnnnnnnnnnnnnnnnnnnnnnnnnnnnnnnnnnnnnnnnnnnnnnnnnnnnnnnnnnnnnnnnnnnnnnnnnnnnnnnnnnnnnnnnnnnnnnnnnnnnnnnnnnnnnnnnnnnnnnnnnnnnnnnnnnnnnnnnnnnnnnnnnnnnnnnnnnnnnnnnnnnnnnnnnnnnnnnnnnnnnnnnnnnnnnnnnnnnnnnnnnnnnnnnnnnnnnnnnnnnnnnnnnnnnnnnnnnnnnnnnnnnnnnnnnnnnnnnnnnnnnnnnnnnnnnnnnnnnnnnnnnnnnnnnnnnnnnnnnnnnnnnnnnnnnnnnnnnnnnnnnnnnnnnnnnnnnnnnnnnnnnnnnnnnnnnnnnnnnnnnnnnnnnnnnnnnnnnnnnnnnnnnnnnnnnnnnnnnnnnnnnnnnnnnnnnnnnnnnnnnnnnnnnnnnnnnnnnnnnnnnnnnnnnnnnnnnnnnnnnnnnnnnnnnnnnnnnnnnnnnnnnnnnnnnnnnnnnnnnnnnnnnnnnnnnnnnnnnnnnnnnnnnnnnnnnnnnnnnnnnnnnnnnnnnnnnnnnnnnnnnnnnnnnnnnnnnnnnnnnnnnnnnnnnnnnnnnnnnnnnnnnnnnnnnnnnnnnnnnnnnnnnnnnnnnnnnnnnnnnnnnnnnnnnnnnnnnnnnnnnnnnnnnnnnnnnnnnnnnnnnnnnnnnnnnnnnnnnnnnnnnnnnnnnnnnnnnnnnnnnnnnnnnnnnnnnnnnnnnnnnnnnnnnnnnnnnnnnnnnnnnnnnnnnnnnnnnnnnnnnnnnnnnnnnnnnnnnnnnnnnnnnnnnnnnnnnnnnnnnnnnnnnnnnnnnnnnnnnnnnnnnnnnnnnnnnnnnnnnnnnnnnnnnnnnnnnnnnnnnnnnnnnnnnnnnnnnnnnnnnnnnnnnnnnnnnnnnnnnnnnnnnnnnnnnnnnnnnnnnnnnnnnnnnnnnnnnnnnnnnnnnnnnnnnnnnnnnnnnnnnnnnnnnnnnnnnnnnnnnnnnnnnnnnnnnnnnnnnnnnnnnnnnnnnnnnnnnnnnnnnnnnnnnnnnnnnnnnnnnnnnnnnnnnnnnnnnnnnnnnnnnnnnnnnnnnnnnnnnnnnnnnnnnnnnnnnnnnnnnnnnnnnnnnnnnnnnnnnnnnnnnnnnnnnnnnnnnnnnnnnnnnnnnnnnnnnnnnnnnnnnnnnnnnnnnnnnnnnnnnnnnnnnnnnnnnnnnnnnnnnnnnnnnnnnnnnnnnnnnnnnnnnnnnnnnnnnnnnnnnnnnnnnnnnnnnnnnnnnnnnnnnnnnnnnnnnnnnnnnnnnnnnnnnnnnnnnnnnnnnnnnnnnnnnnnnnnnnnnnnnnnnnnnnnnnnnnnnnnnnnnnnnnnnnnnnnnnnnnnnnnnnnnnnnnnnnnnnnnnnnnnnnnnnnnnnnnnnnnnnnnnnnnnnnnnnnnnnnnnnnnnnnnnnnnnnnnnnnnnnnnnnnnnnnnnnnnnnnnnnnnnnnnnnnnnnnnnnnnnnnnnnnnnnnnnnnnnnnnnnnnnnnnnnnnnnnnnnnnnnnnnnnnnnnnnnnnnnnnnnnnnnnnnnnnnnnnnnnnnnnnnnnnnnnnnnnnnnnnnnnnnnnnnnnnnnnnnnnnnnnnnnnnnnnnnnnnnnnnnnnnnnnnnnnnnnnnnnnnnnnnnnnnnnnnnnnnnnnnnnnnnnnnnnnnnnnnnnnnnnnnnnnnnnnnnnnnnnnnnnnnnnnnnnnnnnnnnnnnnnnnnnnnnnnnnnnnnnnnnnnnnnnnnnnnnnnnnnnnnnnnnnnnnnnnnnnnnnnnnnnnnnnnnnnnnnnnnnnnnnnnnnnnnnnnnnnnnnnnnnnnnnnnnnnnnnnnnnnnnnnnnnnnnnnnnnnnnnnnnnnnnnnnnnnnnnnnnnnnnnnnnnnnnnnnnnnnnnnnnnnnnnnnnnnnnnnnnnnnnnnnnnnnnnnnnnnnnnnnnnnnnnnnnnnnnnnnnnnnnnnnnnnnnnnnnnnnnnnnnnnnnnnnnnnnnnnnnnnnnnnnnnnnnnnnnnnnnnnnnnnnnnnnnnnnnnnnnnnnnnnnnnnnnnnnnnnnnnnnnnnnnnnnnnnnnnnnnnnnnnnnnnnnnnnnnnnnnnnnnnnnnnnnnnnnnnnnnnnnnnnnnnnnnnnnnnnnnnnnnnnnnnnnnnnnnnnnnnnnnnnnnnnnnnnnnnnnnnnnnnnnnnnnnnnnnnnnnnnnnnnnnnnnnnnnnnnnnnnnnnnnnnnnnnnnnnnnnnnnnnnnnnnnnnnnnnnnnnnnnnnnnnnnnnnnnnnnnnnnnnnnnnnnnnnnnnnnnnnnnnnnnnnnnnnnnnnnnnnnnnnnnnnnnnnnnnnnnnnnnnnnnnnnnnnnnnnnnnnnnnnnnnnnnnnnnnnnnnnnnnnnnnnnnnnnnnnnnnnnnnnnnnnnnnnnnnnnnnnnnnnnnnnnnnnnnnnnnnnnnnnnnnnnnnnnnnnnnnnnnnnnnnnnnnnnnnnnnnnnnnnnnnnnnnnnnnnnnnnnnnnnnnnnnnnnnnnnnnnnnnnnnnnnnnnnnnnnnnnnnnnnnnnnnnnnnnnnnnnnnnnnnnnnnnnnnnnnnnnnnnnnnnnnnnnnnnnnnnnnnnnnnnnnnnnnnnnnnnnnnnnnnnnnnnnnnnnnnnnnnnnnnnnnnnnnnnnnnnnnnnnnnnnnnnnnnnnnnnnnnnnnnnnnnnnnnnnnnnnnnnnnnnnnnnnnnnnnnnnnnnnnnnnnnnnnnnnnnnnnnnnnnnnnnnnnnnnnnnnnnnnnnnnnnnnnnnnnnnnnnnnnnnnnnnnnnnnnnnnnnnnnnnnnnnnnnnnnnnnnnnnnnnnnnnnnnnnnnnnnnnnnnnnnnnnnnnnnnnnnnnnnnnnnnnnnnnnnnnnnnnnnnnnnnnnnnnnnnnnnnnnnnnnnnnnnnnnnnnnnnnnnnnnnnnnnnnnnnnnnnnnnnnnnnnnnnnnnnnnnnnnnnnnnnnnnnnnnnnnnnnnnnnnnnnnnnnnnnnnnnnnnnnnnnnnnnnnnnnnnnnnnnnnnnnnnnnnnnnnnnnnnnnnnnnnnnnnnnnnnnnnnnnnnnnnnnnnnnnnnnnnnnnnnnnnnnnnnnnnnnnnnnnnnnnnnnnnnnnnnnnnnnnnnnnnnnnnnnnnnnnnnnnnnnnnnnnnnnnnnnnnnnnnnnnnnnnnnnnnnnnnnnnnnnnnnnnnnnnnnnnnnnnnnnnnnnnnnnnnnnnnnnnnnnnnnnnnnnnnnnnnnnnnnnnnnnnnnnnnnnnnnnnnnnnnnnnnnnnnnnnnnnnnnnnnnnnnnnnnnnnnnnnnnnnnnnnnnnnnnnnnnnnnnnnnnnnnnnnnnnnnnnnnnnnnnnnnnnnnnnnnnnnnnnnnnnnnnnnnnnnnnnnnnnnnnnnnnnnnnnnnnnnnnnnnnnnnnnnnnnnnnnnnnnnnnnnnnnnnnnnnnnnnnnnnnnnnnnnnnnnnnnnnnnnnnnnnnnnnnnnnnnnnnnnnnnnnnnnnnnnnnnnnnnnnnnnnnnnnnnnnnnnnnnnnnnnnnnnnnnnnnnnnnnnnnnnnnnnnnnnnnnnnnnnnnnnnnnnnnnnnnnnnnnnnnnnnnnnnnnnnnnnnnnnnnnnnnnnnnnnnnnnnnnnnnnnnnnnnnnnnnnnnnnnnnnnnnnnnnnnnnnnnnnnnnnnnnnnnnnnnnnnnnnnnnnnnnnnnnnnnnnnnnnnnnnnnnnnnnnnnnnnnnnnnnnnnnnnnnnnnnnnnnnnnnnnnnnnnnnnnnnnnnnnnnnnnnnnnnnnnnnnnnnnnnnnnnnnnnnnnnnnnnnnnnnnnnnnnnnnnnnnnnnnnnnnnnnnnnnnnnnnnnnnnnnnnnnnnnnnnnnnnnnnnnnnnnnnnnnnnnnnnnnnnnnnnnnnnnnnnnnnnnnnnnnnnnnnnnnnnnnnnnnnnnnnnnnnnnnnnnnnnnnnnnnnnnnnnnnnnnnnnnnnnnnnnnnnnnnnnnnnnnnnnnnnnnnnnnnnnnnnnnnnnnnnnnnnnnnnnnnnnnnnnnnnnnnnnnnnnnnnnnnnnnnnnnnnnnnnnnnnnnnnnnnnnnnnnnnnnnnnnnnnnnnnnnnnnnnnnnnnnnnnnnnnnnnnnnnnnnnnnnnnnnnnnnnnnnnnnnnnnnnnnnnnnnnnnnnnnnnnnnnnnnnnnnnnnnnnnnnnnnnnnnnnnnnnnnnnnnnnnnnnnnnnnnnnnnnnnnnnnnnnnnnnnnnnnnnnnnnnnnnnnnnnnnnnnnnnnnnnnnnnnnnnnnnnnnnnnnnnnnnnnnnnnnnnnnnnnnnnnnnnnnnnnnnnnnnnnnnnnnnnnnnnnnnnnnnnnnnnnnnnnnnnnnnnnnnnnnnnnnnnnnnnnnnnnnnnnnnnnnnnnnnnnnnnnnnnnnnnnnnnnnnnnnnnnnnnnnnnnnnnnnnnnnnnnnnnnnnnnnnnnnnnnnnnnnnnnnnnnnnnnnnnnnnnnnnnnnnnnnnnnnnnnnnnnnnnnnnnnnnnnnnnnnnnnnnnnnnnnnnnnnnnnnnnnnnnnnnnnnnnnnnnnnnnnnnnnnnnnnnnnnnnnnnnnnnnnnnnnnnnnnnnnnnnnnnnnnnnnnnnnnnnnnnnnnnnnnnnnnnnnnnnnnnnnnnnnnnnnnnnnnnnnnnnnnnnnnnnnnnnnnnnnnnnnnnnnnnnnnnnnnnnnnnnnnnnnnnnnnnnnnnnnnnnnnnnnnnnnnnnnnnnnnnnnnnnnnnnnnnnnnnnnnnnnnnnnnnnnnnnnnnnnnnnnnnnnnnnnnnnnnnnnnnnnnnnnnnnnnnnnnnnnnnnnnnnnnnnnnnnnnnnnnnnnnnnnnnnnnnnnnnnnnnnnnnnnnnnnnnnnnnnnnnnnnnnnnnnnnnnnnnnnnnnnnnnnnnnnnnnnnnnnnnnnnnnnnnnnnnnnnnnnnnnnnnnnnnnnnnnnnnnnnnnnnnnnnnnnnnnnnnnnnnnnnnnnnnnnnnnnnnnnnnnnnnnnnnnnnnnnnnnnnnnnnnnnnnnnnnnnnnnnnnnnnnnnnnnnnnnnnnnnnnnnnnnnnnnnnnnnnnnnnnnnnnnnnnnnnnnnnnnnnnnnnnnnnnnnnnnnnnnnnnnnnnnnnnnnnnnnnnnnnnnnnnnnnnnnnnnnnnnnnnnnnnnnnnnnnnnnnnnnnnnnnnnnnnnnnnnnnnnnnnnnnnnnnnnnnnnnnnnnnnnnnnnnnnnnnnnnnnnnnnnnnnnnnnnnnnnnnnnnnnnnnnnnnnnnnnnnnnnnnnnnnnnnnnnnnnnnnnnnnnnnnnnnnnnnnnnnnnnnnnnnnnnnnnnnnnnnnnnnnnnnnnnnnnnnnnnnnnnnnnnnnnnnnnnnnnnnnnnnnnnnnnnnnnnnnnnnnnnnnnnnnnnnnnnnnnnnnnnnnnnnnnnnnnnnnnnnnnnnnnnnnnnnnnnnnnnnnnnnnnnnnnnnnnnnnnnnnnnnnnnnnnnnnnnnnnnnnnnnnnnnnnnnnnnnnnnnnnnnnnnnnnnnnnnnnnnnnnnnnnnnnnnnnnnnnnnnnnnnnnnnnnnnnnnnnnnnnnnnnnnnnnnnnnnnnnnnnnnnnnnnnnnnnnnnnnnnnnnnnnnnnnnnnnnnnnnnnnnnnnnnnnnnnnnnnnnnnnnnnnnnnnnnnnnnnnnnnnnnnnnnnnnnnnnnnnnnnnnnnnnnnnnnnnnnnnnnnnnnnnnnnnnnnnnnnnnnnnnnnnnnnnnnnnnnnnnnnnnnnnnnnnnnnnnnnnnnnnnnnnnnnnnnnnnnnnnnnnnnnnnnnnnnnnnnnnnnnnnnnnnnnnnnnnnnnnnnnnnnnnnnnnnnnnnnnnnnnnnnnnnnnnnnnnnnnnnnnnnnnnnnnnnnnnnnnnnnnnnnnnnnnnnnnnnnnnnnnnnnnnnnnnnnnnnnnnnnnnnnnnnnnnnnnnnnnnnnnnnnnnnnnnnnnnnnnnnnnnnnnnnnnnnnnnnnnnnnnnnnnnnnnnnnnnnnnnnnnnnnnnnnnnnnnnnnnnnnnnnnnnnnnnnnnnnnnnnnnnnnnnnnnnnnnnnnnnnnnnnnnnnnnnnnnnnnnnnnnnnnnnnnnnnnnnnnnnnnnnnnnnnnnnnnnnnnnnnnnnnnnnnnnnnnnnnnnnnnnnnnnnnnnnnnnnnnnnnnnnnnnnnnnnnnnnnnnnnnnnnnnnnnnnnnnnnnnnnnnnnnnnnnnnnnnnnnnnnnnnnnnnnnnnnnnnnnnnnnnnnnnnnnnnnnnnnnnnnnnnnnnnnnnnnnnnnnnnnnnnnnnnnnnnnnnnnnnnnnnnnnnnnnnnnnnnnnnnnnnnnnnnnnnnnnnnnnnnnnnnnnnnnnnnnnnnnnnnnnnnnnnnnnnnnnnnnnnnnnnnnnnnnnnnnnnnnnnnnnnnnnnnnnnnnnnnnnnnnnnnnnnnnnnnnnnnnnnnnnnnnnnnnnnnnnnnnnnnnnnnnnnnnnnnnnnnnnnnnnnnnnnnnnnnnnnnnnnnnnnnnnnnnnnnnnnnnnnnnnnnnnnnnnnnnnnnnnnnnnnnnnnnnnnnnnnnnnnnnnnnnnnnnnnnnnnnnnnnnnnnnnnnnnnnnnnnnnnnnnnnnnnnnnnnnnnnnnnnnnnnnnnnnnnnnnnnnnnnnnnnnnnnnnnnnnnnnnnnnnnnnnnnnnnnnnnnnnnnnnnnnnnnnnnnnnnnnnnnnnnnnnnnnnnnnnnnnnnnnnnnnnnnnnnnnnnnnnnnnnnnnnnnnnnnnnnnnnnnnnnnnnnnnnnnnnnnnnnnnnnnnnnnnnnnnnnnnnnnnnnnnnnnnnnnnnnnnnnnnnnnnnnnnnnnnnnnnnnnnnnnnnnnnnnnnnnnnnnnnnnnnnnnnnnnnnnnnnnnnnnnnnnnnnnnnnnnnnnnnnnnnnnnnnnnnnnnnnnnnnnnnnnnnnnnnnnnnnnnnnnnnnnnnnnnnnnnnnnnnnnnnnnnnnnnnnnnnnnnnnnnnnnnnnnnnnnnnnnnnnnnnnnnnnnnnnnnnnnnnnnnnnnnnnnnnnnnnnnnnnnnnnnnnnnnnnnnnnnnnnnnnnnnnnnnnnnnnnnnnnnnnnnnnnnnnnnnnnnnnnnnnnnnnnnnnnnnnnnnnnnnnnnnnnnnnnnnnnnnnnnnnnnnnnnnnnnnnnnnnnnnnnnnnnnnnnnnnnnnnnnnnnnnnnnnnnnnnnnnnnnnnnnnnnnnnnnnnnnnnnnnnnnnnnnnnnnnnnnnnnnnnnnnnnnnnnnnnnnnnnnnnnnnnnnnnnnnnnnnnnnnnnnnnnnnnnnnnnnnnnnnnnnnnnnnnnnnnnnnnnnnnnnnnnnnnnnnnnnnnnnnnnnnnnnnnnnnnnnnnnnnnnnnnnnnnnnnnnnnnnnnnnnnnnnnnnnnnnnnnnnnnnnnnnnnnnnnnnnnnnnnnnnnnnnnnnnnnnnnnnnnnnnnnnnnnnnnnnnnnnnnnnnnnnnnnnnnnnnnnnnnnnnnnnnnnnnnnnnnnnnnnnnnnnnnnnnnnnnnnnnnnnnnnnnnnnnnnnnnnnnnnnnnnnnnnnnnnnnnnnnnnnnnnnnnnnnnnnnnnnnnnnnnnnnnnnnnnnnnnnnnnnnnnnnnnnnnnnnnnnnnnnnnnnnnnnnnnnnnnnnnnnnnnnnnnnnnnnnnnnnnnnnnnnnnnnnnnnnnnnnnnnnnnnnnnnnnnnnnnnnnnnnnnnnnnnnnnnnnnnnnnnnnnnnnnnnnnnnnnnnnnnnnnnnnnnnnnnnnnnnnnnnnnnnnnnnnnnnnnnnnnnnnnnnnnnnnnnnnnnnnnnnnnnnnnnnnnnnnnnnnnnnnnnnnnnnnnnnnnnnnnnnnnnnnnnnnnnnnnnnnnnnnnnnnnnnnnnnnnnnnnnnnnnnnnnnnnnnnnnnnnnnnnnnnnnnnnnnnnnnnnnnnnnnnnnnnnnnnnnnnnnnnnnnnnnnnnnnnnnnnnnnnnnnnnnnnnnnnnnnnnnnnnnnnnnnnnnnnnnnnnnnnnnnnnnnnnnnnnnnnnnnnnnnnnnnnnnnnnnnnnnnnnnnnnnnnnnnnnnnnnnnnnnnnnnnnnnnnnnnnnnnnnnnnnnnnnnnnnnnnnnnnnnnnnnnnnnnnnnnnnnnnnnnnnnnnnnnnnnnnnnnnnnnnnnnnnnnnnnnnnnnnnnnnnnnnnnnnnnnnnnnnnnnnnnnnnnnnnnnnnnnnnnnnnnnnnnnnnnnnnnnnnnnnnnnnnnnnnnnnnnnnnnnnnnnnnnnnnnnnnnnnnnnnnnnnnnnnnnnnnnnnnnnnnnnnnnnnnnnnnnnnnnnnnnnnnnnnnnnnnnnnnnnnnnnnnnnnnnnnnnnnnnnnnnnnnnnnnnnnnnnnnnnnnnnnnnnnnnnnnnnnnnnnnnnnnnnnnnnnnnnnnnnnnnnnnnnnnnnnnnnnnnnnnnnnnnnnnnnnnnnnnnnnnnnnnnnnnnnnnnnnnnnnnnnnnnnnnnnnnnnnnnnnnnnnnnnnnnnnnnnnnnnnnnnnnnnnnnnnnnnnnnnnnnnnnnnnnnnnnnnnnnnnnnnnnnnnnnnnnnnnnnnnnnnnnnnnnnnnnnnnnnnnnnnnnnnnnnnnnnnnnnnnnnnnnnnnnnnnnnnnnnnnnnnnnnnnnnnnnnnnnnnnnnnnnnnnnnnnnnnnnnnnnnnnnnnnnnnnnnnnnnnnnnnnnnnnnnnnnnnnnnnnnnnnnnnnnnnnnnnnnnnnnnnnnnnnnnnnnnnnnnnnnnnnnnnnnnnnnnnnnnnnnnnnnnnnnnnnnnnnnnnnnnnnnnnnnnnnnnnnnnnnnnnnnnnnnnnnnnnnnnnnnnnnnnnnnnnnnnnnnnnnnnnnnnnnnnnnnnnnnnnnnnnnnnnnnnnnnnnnnnnnnnnnnnnnnnnnnnnnnnnnnnnnnnnnnnnnnnnnnnnnnnnnnnnnnnnnnnnnnnnnnnnnnnnnnnnnnnnnnnnnnnnnnnnnnnnnnnnnnnnnnnnnnnnnnnnnnnnnnnnnnnnnnnnnnnnnnnnnnnnnnnnnnnnnnnnnnnnnnnnnnnnnnnnnnnnnnnnnnnnnnnnnnnnnnnnnnnnnnnnnnnnnnnnnnnnnnnnnnnnnnnnnnnnnnnnnnnnnnnnnnnnnnnnnnnnnnnnnnnnnnnnnnnnnnnnnnnnnnnnnnnnnnnnnnnnnnnnnnnnnnnnnnnnnnnnnnnnnnnnnnnnnnnnnnnnnnnnnnnnnnnnnnnnnnnnnnnnnnnnnnnnnnnnnnnnnnnnnnnnnnnnnnnnnnnnnnnnnnnnnnnnnnnnnnnnnnnnnnnnnnnnnnnnnnnnnnnnnnnnnnnnnnnnnnnnnnnnnnnnnnnnnnnnnnnnnnnnnnnnnnnnnnnnnnnnnnnnnnnnnnnnnnnnnnnnnnnnnnnnnnnnnnnnnnnnnnnnnnnnnnnnnnnnnnnnnnnnnnnnnnnnnnnnnnnnnnnnnnnnnnnnnnnnnnnnnnnnnnnnnnnnnnnnnnnnnnnnnnnnnnnnnnnnnnnnnnnnnnnnnnnnnnnnnnnnnnnnnnnnnnnnnnnnnnnnnnnnnnnnnnnnnnnnnnnnnnnnnnnnnnnnnnnnnnnnnnnnnnnnnnnnnnnnnnnnnnnnnnnnnnnnnnnnnnnnnnnnnnnnnnnnnnnnnnnnnnnnnnnnnnnnnnnnnnnnnnnnnnnnnnnnnnnnnnnnnnnnnnnnnnnnnnnnnnnnnnnnnnnnnnnnnnnnnnnnnnnnnnnnnnnnnnnnnnnnnnnnnnnnnnnnnnnnnnnnnnnnnnnnnnnnnnnnnnnnnnnnnnnnnnnnnnnnnnnnnnnnnnnnnnnnnnnnnnnnnnnnnnnnnnnnnnnnnnnnnnnnnnnnnnnnnnnnnnnnnnnnnnnnnnnnnnnnnnnnnnnnnnnnnnnnnnnnnnnnnnnnnnnnnnnnnnnnnnnnnnnnnnnnnnnnnnnnnnnnnnnnnnnnnnnnnnnnnnnnnnnnnnnnnnnnnnnnnnnnnnnnnnnnnnnnnnnnnnnnnnnnnnnnnnnnnnnnnnnnnnnnnnnnnnnnnnnnnnnnnnnnnnnnnnnnnnnnnnnnnnnnnnnnnnnnnnnnnnnnnnnnnnnnnnnnnnnnnnnnnnnnnnnnnnnnnnnnnnnnnnnnnnnnnnnnnnnnnnnnnnnnnnnnnnnnnnnnnnnnnnnnnnnnnnnnnnnnnnnnnnnnnnnnnnnnnnnnnnnnnnnnnnnnnnnnnnnnnnnnnnnnnnnnnnnnnnnnnnnnnnnnnnnnnnnnnnnnnnnnnnnnnnnnnnnnnnnnnnnnnnnnnnnnnnnnnnnnnnnnnnnnnnnnnnnnnnnnnnnnnnnnnnnnnnnnnnnnnnnnnnnnnnnnnnnnnnnnnnnnnnnnnnnnnnnnnnnnnnnnnnnnnnnnnnnnnnnnnnnnnnnnnnnnnnnnnnnnnnnnnnnnnnnnnnnnnnnnnnnnnnnnnnnnnnnnnnnnnnnnnnnnnnnnnnnnnnnnnnnnnnnnnnnnnnnnnnnnnnnnnnnnnnnnnnnnnnnnnnnnnnnnnnnnnnnnnnnnnnnnnnnnnnnnnnnnnnnnnnnnnnnnnnnnnnnnnnnnnnnnnnnnnnnnnnnnnnnnnnnnnnnnnnnnnnnnnnnnnnnnnnnnnnnnnnnnnnnnnnnnnnnnnnnnnnnnnnnnnnnnnnnnnnnnnnnnnnnnnnnnnnnnnnnnnnnnnnnnnnnnnnnnnnnnnnnnnnnnnnnnnnnnnnnnnnnnnnnnnnnnnnnnnnnnnnnnnnnnnnnnnnnnnnnnnnnnnnnnnnnnnnnnnnnnnnnnnnnnnnnnnnnnnnnnnnnnnnnnnnnnnnnnnnnnnnnnnnnnnnnnnnnnnnnnnnnnnnnnnnnnnnnnnnnnnnnnnnnnnnnnnnnnnnnnnnnnnnnnnnnnnnnnnnnnnnnnnnnnnnnnnnnnnnnnnnnnnnnnnnnnnnnnnnnnnnnnnnnnnnnnnnnnnnnnnnnnnnnnnnnnnnnnnnnnnnnnnnnnnnnnnnnnnnnnnnnnnnnnnnnnnnnnnnnnnnnnnnnnnnnnnnnnnnnnnnnnnnnnnnnnnnnnnnnnnnnnnnnnnnnnnnnnnnnnnnnnnnnnnnnnnnnnnnnnnnnnnnnnnnnnnnnnnnnnnnnnnnnnnnnnnnnnnnnnnnnnnnnnnnnnnnnnnnnnnnnnnnnnnnnnnnnnnnnnnnnnnnnnnnnnnnnnnnnnnnnnnnnnnnnnnnnnnnnnnnnnnnnnnnnnnnnnnnnnnnnnnnnnnnnnnnnnnnnnnnnnnnnnnnnnnnnnnnnnnnnnnnnnnnnnnnnnnnnnnnnnnnnnnnnnnnnnnnnnnnnnnnnnnnnnnnnnnnnnnnnnnnnnnnnnnnnnnnnnnnnnnnnnnnnnnnnnnnnnnnnnnnnnnnnnnnnnnnnnnnnnnnnnnnnnnnnnnnnnnnnnnnnnnnnnnnnnnnnnnnnnnnnnnnnnnnnnnnnnnnnnnnnnnnnnnnnnnnnnnnnnnnnnnnnnnnnnnnnnnnnnnnnnnnnnnnnnnnnnnnnnnnnnnnnnnnnnnnnnnnnnnnnnnnnnnnnnnnnnnnnnnnnnnnnnnnnnnnnnnnnnnnnnnnnnnnnnnnnnnnnnnnnnnnnnnnnnnnnnnnnnnnnnnnnnnnnnnnnnnnnnnnnnnnnnnnnnnnnnnnnnnnnnnnnnnnnnnnnnnnnnnnnnnnnnnnnnnnnnnnnnnnnnnnnnnnnnnnnnnnnnnnnnnnnnnnnnnnnnnnnnnnnnnnnnnnnnnnnnnnnnnnnnnnnnnnnnnnnnnnnnnnnnnnnnnnnnnnnnnnnnnnnnnnnnnnnnnnnnnnnnnnnnnnnnnnnnnnnnnnnnnnnnnnnnnnnnnnnnnnnnnnnnnnnnnnnnnnnnnnnnnnnnnnnnnnnnnnnnnnnnnnnnnnnnnnnnnnnnnnnnnnnnnnnnnnnnnnnnnnnnnnnnnnnnnnnnnnnnnnnnnnnnnnnnnnnnnnnnnnnnnnnnnnnnnnnnnnnnnnnnnnnnnnnnnnnnnnnnnnnnnnnnnnnnnnnnnnnnnnnnnnnnnnnnnnnnnnnnnnnnnnnnnnnnnnnnnnnnnnnnnnnnnnnnnnnnnnnnnnnnnnnnnnnnnnnnnnnnnnnnnnnnnnnnnnnnnnnnnnnnnnnnnnnnnnnnnnnnnnnnnnnnnnnnnnnnnnnnnnnnnnnnnnnnnnnnnnnnnnnnnnnnnnnnnnnnnnnnnnnnnnnnnnnnnnnnnnnnnnnnnnnnnnnnnnnnnnnnnnnnnnnnnnnnnnnnnnnnnnnnnnnnnnnnnnnnnnnnnnnnnnnnnnnnnnnnnnnnnnnnnnnnnnnnnnnnnnnnnnnnnnnnnnnnnnnnnnnnnnnnnnnnnnnnnnnnnnnnnnnnnnnnnnnnnnnnnnnnnnnnnnnnnnnnnnnnnnnnnnnnnnnnnnnnnnnnnnnnnnnnnnnnnnnnnnnnnnnnnnnnnnnnnnnnnnnnnnnnnnnnnnnnnnnnnnnnnnnnnnnnnnnnnnnnnnnnnnnnnnnnnnnnnnnnnnnnnnnnnnnnnnnnnnnnnnnnnnnnnnnnnnnnnnnnnnnnnnnnnnnnnnnnnnnnnnnnnnnnnnnnnnnnnnnnnnnnnnnnnnnnnnnnnnnnnnnnnnnnnnnnnnnnnnnnnnnnnnnnnnnnnnnnnnnnnnnnnnnnnnnnnnnnnnnnnnnnnnnnnnnnnnnnnnnnnnnnnnnnnnnnnnnnnnnnnnnnnnnnnnnnnnnnnnnnnnnnnnnnnnnnnnnnnnnnnnnnnnnnnnnnnnnnnnnnnnnnnnnnnnnnnnnnnnnnnnnnnnnnnnnnnnnnnnnnnnnnnnnnnnnnnnnnnnnnnnnnnnnnnnnnnnnnnnnnnnnnnnnnnnnnnnnnnnnnnnnnnnnnnnnnnnnnnnnnnnnnnnnnnnnnnnnnnnnnnnnnnnnnnnnnnnnnnnnnnnnnnnnnnnnnnnnnnnnnnnnnnnnnnnnnnnnnnnnnnnnnnnnnnnnnnnnnnnnnnnnnnnnnnnnnnnnnnnnnnnnnnnnnnnnnnnnnnnnnnnnnnnnnnnnnnnnnnnnnnnnnnnnnnnnnnnnnnnnnnnnnnnnnnnnnnnnnnnnnnnnnnnnnnnnnnnnnnnnnnnnnnnnnnnnnnnnnnnnnnnnnnnnnnnnnnnnnnnnnnnnnnnnnnnnnnnnnnnnnnnnnnnnnnnnnnnnnnnnnnnnnnnnnnnnnnnnnnnnnnnnnnnnnnnnnnnnnnnnnnnnnnnnnnnnnnnnnnnnnnnnnnnnnnnnnnnnnnnnnnnnnnnnnnnnnnnnnnnnnnnnnnnnnnnnnnnnnnnnnnnnnnnnnnnnnnnnnnnnnnnnnnnnnnnnnnnnnnnnnnnnnnnnnnnnnnnnnnnnnnnnnnnnnnnnnnnnnnnnnnnnnnnnnnnnnnnnnnnnnnnnnnnnnnnnnnnnnnnnnnnnnnnnnnnnnnnnnnnnnnnnnnnnnnnnnnnnnnnnnnnnnnnnnnnnnnnnnnnnnnnnnnnnnnnnnnnnnnnnnnnnnnnnnnnnnnnnnnnnnnnnnnnnnnnnnnnnnnnnnnnnnnnnnnnnnnnnnnnnnnnnnnnnnnnnnnnnnnnnnnnnnnnnnnnnnnnnnnnnnnnnnnnnnnnnnnnnnnnnnnnnnnnnnnnnnnnnnnnnnnnnnnnnnnnnnnnnnnnnnnnnnnnnnnnnnnnnnnnnnnnnnnnnnnnnnnnnnnnnnnnnnnnnnnnnnnnnnnnnnnnnnnnnnnnnnnnnnnnnnnnnnnnnnnnnnnnnnnnnnnnnnnnnnnnnnnnnnnnnnnnnnnnnnnnnnnnnnnnnnnnnnnnnnnnnnnnnnnnnnnnnnnnnnnnnnnnnnnnnnnnnnnnnnnnnnnnnnnnnnnnnnnnnnnnnnnnnnnnnnnnnnnnnnnnnnnnnnnnnnnnnnnnnnnnnnnnnnnnnnnnnnnnnnnnnnnnnnnnnnnnnnnnnnnnnnnnnnnnnnnnnnnnnnnnnnnnnnnnnnnnnnnnnnnnnnnnnnnnnnnnnnnnnnnnnnnnnnnnnnnnnnnnnnnnnnnnnnnnnnnnnnnnnnnnnnnnnnnnnnnnnnnnnnnnnnnnnnnnnnnnnnnnnnnnnnnnnnnnnnnnnnnnnnnnnnnnnnnnnnnnnnnnnnnnnnnnnnnnnnnnnnnnnnnnnnnnnnnnnnnnnnnnnnnnnnnnnnnnnnnnnnnnnnnnnnnnnnnnnnnnnnnnnnnnnnnnnnnnnnnnnnnnnnnnnnnnnnnnnnnnnnnnnnnnnnnnnnnnnnnnnnnnnnnnnnnnnnnnnnnnnnnnnnnnnnnnnnnnnnnnnnnnnnnnnnnnnnnnnnnnnnnnnnnnnnnnnnnnnnnnnnnnnnnnnnnnnnnnnnnnnnnnnnnnnnnnnnnnnnnnnnnnnnnnnnnnnnnnnnnnnnnnnnnnnnnnnnnnnnnnnnnnnnnnnnnnnnnnnnnnnnnnnnnnnnnnnnnnnnnnnnnnnnnnnnnnnnnnnnnnnnnnnnnnnnnnnnnnnnnnnnnnnnnnnnnnnnnnnnnnnnnnnnnnnnnnnnnnnnnnnnnnnnnnnnnnnnnnnnnnnnnnnnnnnnnnnnnnnnnnnnnnnnnnnnnnnnnnnnnnnnnnnnnnnnnnnnnnnnnnnnnnnnnnnnnnnnnnnnnnnnnnnnnnnnnnnnnnnnnnnnnnnnnnnnnnnnnnnnnnnnnnnnnnnnnnnnnnnnnnnnnnnnnnnnnnnnnnnnnnnnnnnnnnnnnnnnnnnnnnnnnnnnnnnnnnnnnnnnnnnnnnnnnnnnnnnnnnnnnnnnnnnnnnnnnnnnnnnnnnnnnnnnnnnnnnnnnnnnnnnnnnnnnnnnnnnnnnnnnnnnnnnnnnnnnnnnnnnnnnnnnnnnnnnnnnnnnnnnnnnnnnnnnnnnnnnnnnnnnnnnnnnnnnnnnnnnnnnnnnnnnnnnnnnnnnnnnnnnnnnnnnnnnnnnnnnnnnnnnnnnnnnnnnnnnnnnnnnnnnnnnnnnnnnnnnnnnnnnnnnnnnnnnnnnnnnnnnnnnnnnnnnnnnnnnnnnnnnnnnnnnnnnnnnnnnnnnnnnnnnnnnnnnnnnnnnnnnnnnnnnnnnnnnnnnnnnnnnnnnnnnnnnnnnnnnnnnnnnnnnnnnnnnnnnnnnnnnnnnnnnnnnnnnnnnnnnnnnnnnnnnnnnnnnnnnnnnnnnnnnnnnnnnnnnnnnnnnnnnnnnnnnnnnnnnnnnnnnnnnnnnnnnnnnnnnnnnnnnnnnnnnnnnnnnnnnnnnnnnnnnnnnnnnnnnnnnnnnnnnnnnnnnnnnnnnnnnnnnnnnnnnnnnnnnnnnnnnnnnnnnnnnnnnnnnnnnnnnnnnnnnnnnnnnnnnnnnnnnnnnnnnnnnnnnnnnnnnnnnnnnnnnnnnnnnnnnnnnnnnnnnnnnnnnnnnnnnnnnnnnnnnnnnnnnnnnnnnnnnnnnnnnnnnnnnnnnnnnnnnnnnnnnnnnnnnnnnnnnnnnnnnnnnnnnnnnnnnnnnnnnnnnnnnnnnnnnnnnnnnnnnnnnnnnnnnnnnnnnnnnnnnnnnnnnnnnnnnnnnnnnnnnnnnnnnnnnnnnnnnnnnnnnnnnnnnnnnnnnnnnnnnnnnnnnnnnnnnnnnnnnnnnnnnnnnnnnnnnnnnnnnnnnnnnnnnnnnnnnnnnnnnnnnnnnnnnnnnnnnnnnnnnnnnnnnnnnnnnnnnnnnnnnnnnnnnnnnnnnnnnnnnnnnnnnnnnnnnnnnnnnnnnnnnnnnnnnnnnnnnnnnnnnnnnnnnnnnnnnnnnnnnnnnnnnnnnnnnnnnnnnnnnnnnnnnnnnnnnnnnnnnnnnnnnnnnnnnnnnnnnnnnnnnnnnnnnnnnnnnnnnnnnnnnnnnnnnnnnnnnnnnnnnnnnnnnnnnnnnnnnnnnnnnnnnnnnnnnnnnnnnnnnnnnnnnnnnnnnnnnnnnnnnnnnnnnnnnnnnnnnnnnnnnnnnnnnnnnnnnnnnnnnnnnnnnnnnnnnnnnnnnnnnnnnnnnnnnnnnnnnnnnnnnnnnnnnnnnnnnnnnnnnnnnnnnnnnnnnnnnnnnnnnnnnnnnnnnnnnnnnnnnnnnnnnnnnnnnnnnnnnnnnnnnnnnnnnnnnnnnnnnnnnnnnnnnnnnnnnnnnnnnnnnnnnnnnnnnnnnnnnnnnnnnnnnnnnnnnnnnnnnnnnnnnnnnnnnnnnnnnnnnnnnnnnnnnnnnnnnnnnnnnnnnnnnnnnnnnnnnnnnnnnnnnnnnnnnnnnnnnnnnnnnnnnnnnnnnnnnnnnnnnnnnnnnnnnnnnnnnnnnnnnnnnnnnnnnnnnnnnnnnnnnnnnnnnnnnnnnnnnnnnnnnnnnnnnnnnnnnnnnnnnnnnnnnnnnnnnnnnnnnnnnnnnnnnnnnnnnnnnnnnnnnnnnnnnnnnnnnnnnnnnnnnnnnnnnnnnnnnnnnnnnnnnnnnnnnnnnnnnnnnnnnnnnnnnnnnnnnnnnnnnnnnnnnnnnnnnnnnnnnnnnnnnnnnnnnnnnnnnnnnnnnnnnnnnnnnnnnnnnnnnnnnnnnnnnnnnnnnnnnnnnnnnnnnnnnnnnnnnnnnnnnnnnnnnnnnnnnnnnnnnnnnnnnnnnnnnnnnnnnnnnnnnnnnnnnnnnnnnnnnnnnnnnnnnnnnnnnnnnnnnnnnnnnnnnnnnnnnnnnnnnnnnnnnnnnnnnnnnnnnnnnnnnnnnnnnnnnnnnnnnnnnnnnnnnnnnnnnnnnnnnnnnnnnnnnnnnnnnnnnnnnnnnnnnnnnnnnnnnnnnnnnnnnnnnnnnnnnnnnnnnnnnnnnnnnnnnnnnnnnnnnnnnnnnnnnnnnnnnnnnnnnnnnnnnnnnnnnnnnnnnnnnnnnnnnnnnnnnnnnnnnnnnnnnnnnnnnnnnnnnnnnnnnnnnnnnnnnnnnnnnnnnnnnnnnnnnnnnnnnnnnnnnnnnnnnnnnnnnnnnnnnnnnnnnnnnnnnnnnnnnnnnnnnnnnnnnnnnnnnnnnnnnnnnnnnnnnnnnnnnnnnnnnnnnnnnnnnnnnnnnnnnnnnnnnnnnnnnnnnnnnnnnnnnnnnnnnnnnnnnnnnnnnnnnnnnnnnnnnnnnnnnnnnnnnnnnnnnnnnnnnnnnnnnnnnnnnnnnnnnnnnnnnnnnnnnnnnnnnnnnnnnnnnnnnnnnnnnnnnnnnnnnnnnnnnnnnnnnnnnnnnnnnnnnnnnnnnnnnnnnnnnnnnnnnnnnnnnnnnnnnnnnnnnnnnnnnnnnnnnnnnnnnnnnnnnnnnnnnnnnnnnnnnnnnnnnnnnnnnnnnnnnnnnnnnnnnnnnnnnnnnnnnnnnnnnnnnnnnnnnnnnnnnnnnnnnnnnnnnnnnnnnnnnnnnnnnnnnnnnnnnnnnnnnnnnnnnnnnnnnnnnnnnnnnnnnnnnnnnnnnnnnnnnnnnnnnnnnnnnnnnnnnnnnnnnnnnnnnnnnnnnnnnnnnnnnnnnnnnnnnnnnnnnnnnnnnnnnnnnnnnnnnnnnnnnnnnnnnnnnnnnnnnnnnnnnnnnnnnnnnnnnnnnnnnnnnnnnnnnnnnnnnnnnnnnnnnnnnnnnnnnnnnnnnnnnnnnnnnnnnnnnnnnnnnnnnnnnnnnnnnnnnnnnnnnnnnnnnnnnnnnnnnnnnnnnnnnnnnnnnnnnnnnnnnnnnnnnnnnnnnnnnnnnnnnnnnnnnnnnnnnnnnnnnnnnnnnnnnnnnnnnnnnnnnnnnnnnnnnnnnnnnnnnnnnnnnnnnnnnnnnnnnnnnnnnnnnnnnnnnnnnnnnnnnnnnnnnnnnnnnnnnnnnnnnnnnnnnnnnnnnnnnnnnnnnnnnnnnnnnnnnnnnnnnnnnnnnnnnnnnnnnnnnnnnnnnnnnnnnnnnnnnnnnnnnnnnnnnnnnnnnnnnnnnnnnnnnnnnnnnnnnnnnnnnnnnnnnnnnnnnnnnnnnnnnnnnnnnnnnnnnnnnnnnnnnnnnnnnnnnnnnnnnnnnnnnnnnnnnnnnnnnnnnnnnnnnnnnnnnnnnnnnnnnnnnnnnnnnnnnnnnnnnnnnnnnnnnnnnnnnnnnnnnnnnnnnnnnnnnnnnnnnnnnnnnnnnnnnnnnnnnnnnnnnnnnnnnnnnnnnnnnnnnnnnnnnnnnnnnnnnnnnnnnnnnnnnnnnnnnnnnnnnnnnnnnnnnnnnnnnnnnnnnnnnnnnnnnnnnnnnnnnnnnnnnnnnnnnnnnnnnnnnnnnnnnnnnnnnnnnnnnnnnnnnnnnnnnnnnnnnnnnnnnnnnnnnnnnnnnnnnnnnnnnnnnnnnnnnnnnnnnnnnnnnnnnnnnnnnnnnnnnnnnnnnnnnnnnnnnnnnnnnnnnnnnnnnnnnnnnnnnnnnnnnnnnnnnnnnnnnnnnnnnnnnnnnnnnnnnnnnnnnnnnnnnnnnnnnnnnnnnnnnnnnnnnnnnnnnnnnnnnnnnnnnnnnnnnnnnnnnnnnnnnnnnnnnnnnnnnnnnnnnnnnnnnnnnnnnnnnnnnnnnnnnnnnnnnnnnnnnnnnnnnnnnnnnnnnnnnnnnnnnnnnnnnnnnnnnnnnnnnnnnnnnnnnnnnnnnnnnnnnnnnnnnnnnnnnnnnnnnnnnnnnnnnnnnnnnnnnnnnnnnnnnnnnnnnnnnnnnnnnnnnnnnnnnnnnnnnnnnnnnnnnnnnnnnnnnnnnnnnnnnnnnnnnnnnnnnnnnnnnnnnnnnnnnnnnnnnnnnnnnnnnnnnnnnnnnnnnnnnnnnnnnnnnnnnnnnnnnnnnnnnnnnnnnnnnnnnnnnnnnnnnnnnnnnnnnnnnnnnnnnnnnnnnnnnnnnnnnnnnnnnnnnnnnnnnnnnnnnnnnnnnnnnnnnnnnnnnnnnnnnnnnnnnnnnnnnnnnnnnnnnnnnnnnnnnnnnnnnnnnnnnnnnnnnnnnnnnnnnnnnnnnnnnnnnnnnnnnnnnnnnnnnnnnnnnnnnnnnnnnnnnnnnnnnnnnnnnnnnnnnnnnnnnnnnnnnnnnnnnnnnnnnnnnnnnnnnnnnnnnnnnnnnnnnnnnnnnnnnnnnnnnnnnnnnnnnnnnnnnnnnnnnnnnnnnnnnnnnnnnnnnnnnnnnnnnnnnnnnnnnnnnnnnnnnnnnnnnnnnnnnnnnnnnnnnnnnnnnnnnnnnnnnnnnnnnnnnnnnnnnnnnnnnnnnnnnnnnnnnnnnnnnnnnnnnnnnnnnnnnnnnnnnnnnnnnnnnnnnnnnnnnnnnnnnnnnnnnnnnnnnnnnnnnnnnnnnnnnnnnnnnnnnnnnnnnnnnnnnnnnnnnnnnnnnnnnnnnnnnnnnnnnnnnnnnnnnnnnnnnnnnnnnnnnnnnnnnnnnnnnnnnnnnnnnnnnnnnnnnnnnnnnnnnnnnnnnnnnnnnnnnnnnnnnnnnnnnnnnnnnnnnnnnnnnnnnnnnnnnnnnnnnnnnnnnnnnnnnnnnnnnnnnnnnnnnnnnnnnnnnnnnnnnnnnnnnnnnnnnnnnnnnnnnnnnnnnnnnnnnnnnnnnnnnnnnnnnnnnnnnnnnnnnnnnnnnnnnnnnnnnnnnnnnnnnnnnnnnnnnnnnnnnnnnnnnnnnnnnnnnnnnnnnnnnnnnnnnnnnnnnnnnnnnnnnnnnnnnnnnnnnnnnnnnnnnnnnnnnnnnnnnnnnnnnnnnnnnnnnnnnnnnnnnnnnnnnnnnnnnnnnnnnnnnnnnnnnnnnnnnnnnnnnnnnnnnnnnnnnnnnnnnnnnnnnnnnnnnnnnnnnnnnnnnnnnnnnnnnnnnnnnnnnnnnnnnnnnnnnnnnnnnnnnnnnnnnnnnnnnnnnnnnnnnnnnnnnnnnnnnnnnnnnnnnnnnnnnnnnnnnnnnnnnnnnnnnnnnnnnnnnnnnnnnnnnnnnnnnnnnnnnnnnnnnnnnnnnnnnnnnnnnnnnnnnnnnnnnnnnnnnnnnnnnnnnnnnnnnnnnnnnnnnnnnnnnnnnnnnnnnnnnnnnnnnnnnnnnnnnnnnnnnnnnnnnnnnnnnnnnnnnnnnnnnnnnnnnnnnnnnnnnnnnnnnnnnnnnnnnnnnnnnnnnnnnnnnnnnnnnnnnnnnnnnnnnnnnnnnnnnnnnnnnnnnnnnnnnnnnnnnnnnnnnnnnnnnnnnnnnnnnnnnnnnnnnnnnnnnnnnnnnnnnnnnnnnnnnnnnnnnnnnnnnnnnnnnnnnnnnnnnnnnnnnnnnnnnnnnnnnnnnnnnnnnnnnnnnnnnnnnnnnnnnnnnnnnnnnnnnnnnnnnnnnnnnnnnnnnnnnnnnnnnnnnnnnnnnnnnnnnnnnnnnnnnnnnnnnnnnnnnnnnnnnnnnnnnnnnnnnnnnnnnnnnnnnnnnnnnnnnnnnnnnnnnnnnnnnnnnnnnnnnnnnnnnnnnnnnnnnnnnnnnnnnnnnnnnnnnnnnnnnnnnnnnnnnnnnnnnnnnnnnnnnnnnnnnnnnnnnnnnnnnnnnnnnnnnnnnnnnnnnnnnnnnnnnnnnnnnnnnnnnnnnnnnnnnnnnnnnnnnnnnnnnnnnnnnnnnnnnnnnnnnnnnnnnnnnnnnnnnnnnnnnnnnnnnnnnnnnnnnnnnnnnnnnnnnnnnnnnnnnnnnnnnnnnnnnnnnnnnnnnnnnnnnnnnnnnnnnnnnnnnnnnnnnnnnnnnnnnnnnnnnnnnnnnnnnnnnnnnnnnnnnnnnnnnnnnnnnnnnnnnnnnnnnnnnnnnnnnnnnnnnnnnnnnnnnnnnnnnnnnnnnnnnnnnnnnnnnnnnnnnnnnnnnnnnnnnnnnnnnnnnnnnnnnnnnnnnnnnnnnnnnnnnnnnnnnnnnnnnnnnnnnnnnnnnnnnnnnnnnnnnnnnnnnnnnnnnnnnnnnnnnnnnnnnnnnnnnnnnnnnnnnnnnnnnnnnnnnnnnnnnnnnnnnnnnnnnnnnnnnnnnnnnnnnnnnnnnnnnnnnnnnnnnnnnnnnnnnnnnnnnnnnnnnnnnnnnnnnnnnnnnnnnnnnnnnnnnnnnnnnnnnnnnnnnnnnnnnnnnnnnnnnnnnnnnnnnnnnnnnnnnnnnnnnnnnnnnnnnnnnnnnnnnnnnnnnnnnnnnnnnnnnnnnnnnnnnnnnnnnnnnnnnnnnnnnnnnnnnnnnnnnnnnnnnnnnnnnnnnnnnnnnnnnnnnnnnnnnnnnnnnnnnnnnnnnnnnnnnnnnnnnnnnnnnnnnnnnnnnnnnnnnnnnnnnnnnnnnnnnnnnnnnnnnnnnnnnnnnnnnnnnnnnnnnnnnnnnnnnnnnnnnnnnnnnnnnnnnnnnnnnnnnnnnnnnnnnnnnnnnnnnnnnnnnnnnnnnnnnnnnnnnnnnnnnnnnnnnnnnnnnnnnnnnnnnnnnnnnnnnnnnnnnnnnnnnnnnnnnnnnnnnnnnnnnnnnnnnnnnnnnnnnnnnnnnnnnnnnnnnnnnnnnnnnnnnnnnnnnnnnnnnnnnnnnnnnnnnnnnnnnnnnnnnnnnnnnnnnnnnnnnnnnnnnnnnnnnnnnnnnnnnnnnnnnnnnnnnnnnnnnnnnnnnnnnnnnnnnnnnnnnnnnnnnnnnnnnnnnnnnnnnnnnnnnnnnnnnnnnnnnnnnnnnnnnnnnnnnnnnnnnnnnnnnnnnnnnnnnnnnnnnnnnnnnnnnnnnnnnnnnnnnnnnnnnnnnnnnnnnnnnnnnnnnnnnnnnnnnnnnnnnnnnnnnnnnnnnnnnnnnnnnnnnnnnnnnnnnnnnnnnnnnnnnnnnnnnnnnnnnnnnnnnnnnnnnnnnnnnnnnnnnnnnnnnnnnnnnnnnnnnnnnnnnnnnnnnnnnnnnnnnnnnnnnnnnnnnnnnnnnnnnnnnnnnnnnnnnnnnnnnnnnnnnnnnnnnnnnnnnnnnnnnnnnnnnnnnnnnnnnnnnnnnnnnnnnnnnnnnnnnnnnnnnnnnnnnnnnnnnnnnnnnnnnnnnnnnnnnnnnnnnnnnnnnnnnnnnnnnnnnnnnnnnnnnnnnnnnnnnnnnnnnnnnnnnnnnnnnnnnnnnnnnnnnnnnnnnnnnnnnnnnnnnnnnnnnnnnnnnnnnnnnnnnnnnnnnnnnnnnnnnnnnnnnnnnnnnnnnnnnnnnnnnnnnnnnnnnnnnnnnnnnnnnnnnnnnnnnnnnnnnnnnnnnnnnnnnnnnnnnnnnnnnnnnnnnnnnnnnnnnnnnnnnnnnnnnnnnnnnnnnnnnnnnnnnnnnnnnnnnnnnnnnnnnnnnnnnnnnnnnnnnnnnnnnnnnnnnnnnnnnnnnnnnnnnnnnnnnnnnnnnnnnnnnnnnnnnnnnnnnnnnnnnnnnnnnnnnnnnnnnnnnnnnnnnnnnnnnnnnnnnnnnnnnnnnnnnnnnnnnnnnnnnnnnnnnnnnnnnnnnnnnnnnnnnnnnnnnnnnnnnnnnnnnnnnnnnnnnnnnnnnnnnnnnnnnnnnnnnnnnnnnnnnnnnnnnnnnnnnnnnnnnnnnnnnnnnnnnnnnnnnnnnnnnnnnnnnnnnnnnnnnnnnnnnnnnnnnnnnnnnnnnnnnnnnnnnnnnnnnnnnnnnnnnnnnnnnnnnnnnnnnnnnnnnnnnnnnnnnnnnnnnnnnnnnnnnnnnnnnnnnnnnnnnnnnnnnnnnnnnnnnnnnnnnnnnnnnnnnnnnnnnnnnnnnnnnnnnnnnnnnnnnnnnnnnnnnnnnnnnnnnnnnnnnnnnnnnnnnnnnnnnnnnnnnnnnnnnnnnnnnnnnnnnnnnnnnnnnnnnnnnnnnnnnnnnnnnnnnnnnnnnnnnnnnnnnnnnnnnnnnnnnnnnnnnnnnnnnnnnnnnnnnnnnnnnnnnnnnnnnnnnnnnnnnnnnnnnnnnnnnnnnnnnnnnnnnnnnnnnnnnnnnnnnnnnnnnnnnnnnnnnnnnnnnnnnnnnnnnnnnnnnnnnnnnnnnnnnnnnnnnnnnnnnnnnnnnnnnnnnnnnnnnnnnnnnnnnnnnnnnnnnnnnnnnnnnnnnnnnnnnnnnnnnnnnnnnnnnnnnnnnnnnnnnnnnnnnnnnnnnnnnnnnnnnnnnnnnnnnnnnnnnnnnnnnnnnnnnnnnnnnnnnnnnnnnnnnnnnnnnnnnnnnnnnnnnnnnnnnnnnnnnnnnnnnnnnnnnnnnnnnnnnnnnnnnnnnnnnnnnnnnnnnnnnnnnnnnnnnnnnnnnnnnnnnnnnnnnnnnnnnnnnnnnnnnnnnnnnnnnnnnnnnnnnnnnnnnnnnnnnnnnnnnnnnnnnnnnnnnnnnnnnnnnnnnnnnnnnnnnnnnnnnnnnnnnnnnnnnnnnnnnnnnnnnnnnnnnnnnnnnnnnnnnnnnnnnnnnnnnnnnnnnnnnnnnnnnnnnnnnnnnnnnnnnnnnnnnnnnnnnnnnnnnnnnnnnnnnnnnnnnnnnnnnnnnnnnnnnnnnnnnnnnnnnnnnnnnnnnnnnnnnnnnnnnnnnnnnnnnnnnnnnnnnnnnnnnnnnnnnnnnnnnnnnnnnnnnnnnnnnnnnnnnnnnnnnnnnnnnnnnnnnnnnnnnnnnnnnnnnnnnnnnnnnnnnnnnnnnnnnnnnnnnnnnnnnnnnnnnnnnnnnnnnnnnnnnnnnnnnnnnnnnnnnnnnnnnnnnnnnnnnnnnnnnnnnnnnnnnnnnnnnnnnnnnnnnnnnnnnnnnnnnnnnnnnnnnnnnnnnnnnnnnnnnnnnnnnnnnnnnnnnnnnnnnnnnnnnnnnnnnnnnnnnnnnnnnnnnnnnnnnnnnnnnnnnnnnnnnnnnnnnnnnnnnnnnnnnnnnnnnnnnnnnnnnnnnnnnnnnnnnnnnnnnnnnnnnnnnnnnnnnnnnnnnnnnnnnnnnnnnnnnnnnnnnnnnnnnnnnnnnnnnnnnnnnnnnnnnnnnnnnnnnnnnnnnnnnnnnnnnnnnnnnnnnnnnnnnnnnnnnnnnnnnnnnnnnnnnnnnnnnnnnnnnnnnnnnnnnnnnnnnnnnnnnnnnnnnnnnnnnnnnnnnnnnnnnnnnnnnnnnnnnnnnnnnnnnnnnnnnnnnnnnnnnnnnnnnnnnnnnnnnnnnnnnnnnnnnnnnnnnnnnnnnnnnnnnnnnnnnnnnnnnnnnnnnnnnnnnnnnnnnnnnnnnnnnnnnnnnnnnnnnnnnnnnnnnnnnnnnnnnnnnnnnnnnnnnnnnnnnnnnnnnnnnnnnnnnnnnnnnnnnnnnnnnnnnnnnnnnnnnnnnnnnnnnnnnnnnnnnnnnnnnnnnnnnnnnnnnnnnnnnnnnnnnnnnnnnnnnnnnnnnnnnnnnnnnnnnnnnnnnnnnnnnnnnnnnnnnnnnnnnnnnnnnnnnnnnnnnnnnnnnnnnnnnnnnnnnnnnnnnnnnnnnnnnnnnnnnnnnnnnnnnnnnnnnnnnnnnnnnnnnnnnnnnnnnnnnnnnnnnnnnnnnnnnnnnnnnnnnnnnnnnnnnnnnnnnnnnnnnnnnnnnnnnnnnnnnnnnnnnnnnnnnnnnnnnnnnnnnnnnnnnnnnnnnnnnnnnnnnnnnnnnnnnnnnnnnnnnnnnnnnnnnnnnnnnnnnnnnnnnnnnnnnnnnnnnnnnnnnnnnnnnnnnnnnnnnnnnnnnnnnnnnnnnnnnnnnnnnnnnnnnnnnnnnnnnnnnnnnnnnnnnnnnnnnnnnnnnnnnnnnnnnnnnnnnnnnnnnnnnnnnnnnnnnnnnnnnnnnnnnnnnnnnnnnnnnnnnnnnnnnnnnnnnnnnnnnnnnnnnnnnnnnnnnnnnnnnnnnnnnnnnnnnnnnnnnnnnnnnnnnnnnnnnnnnnnnnnnnnnnnnnnnnnnnnnnnnnnnnnnnnnnnnnnnnnnnnnnnnnnnnnnnnnnnnnnnnnnnnnnnnnnnnnnnnnnnnnnnnnnnnnnnnnnnnnnnnnnnnnnnnnnnnnnnnnnnnnnnnnnnnnnnnnnnnnnnnnnnnnnnnnnnnnnnnnnnnnnnnnnnnnnnnnnnnnnnnnnnnnnnnnnnnnnnnnnnnnnnnnnnnnnnnnnnnnnnnnnnnnnnnnnnnnnnnnnnnnnnnnnnnnnnnnnnnnnnnnnnnnnnnnnnnnnnnnnnnnnnnnnnnnnnnnnnnnnnnnnnnnnnnnnnnnnnnnnnnnnnnnnnnnnnnnnnnnnnnnnnnnnnnnnnnnnnnnnnnnnnnnnnnnnnnnnnnnnnnnnnnnnnnnnnnnnnnnnnnnnnnnnnnnnnnnnnnnnnnnnnnnnnnnnnnnnnnnnnnnnnnnnnnnnnnnnnnnnnnnnnnnnnnnnnnnnnnnnnnnnnnnnnnnnnnnnnnnnnnnnnnnnnnnnnnnnnnnnnnnnnnnnnnnnnnnnnnnnnnnnnnnnnnnnnnnnnnnnnnnnnnnnnnnnnnnnnnnnnnnnnnnnnnnnnnnnnnnnnnnnnnnnnnnnnnnnnnnnnnnnnnnnnnnnnnnnnnnnnnnnnnnnnnnnnnnnnnnnnnnnnnnnnnnnnnnnnnnnnnnnnnnnnnnnnnnnnnnnnnnnnnnnnnnnnnnnnnnnnnnnnnnnnnnnnnnnnnnnnnnnnnnnnnnnnnnnnnnnnnnnnnnnnnnnnnnnnnnnnnnnnnnnnnnnnnnnnnnnnnnnnnnnnnnnnnnnnnnnnnnnnnnnnnnnnnnnnnnnnnnnnnnnnnnnnnnnnnnnnnnnnnnnnnnnnnnnnnnnnnnnnnnnnnnnnnnnnnnnnnnnnnnnnnnnnnnnnnnnnnnnnnnnnnnnnnnnnnnnnnnnnnnnnnnnnnnnnnnnnnnnnnnnnnnnnnnnnnnnnnnnnnnnnnnnnnnnnnnnnnnnnnnnnnnnnnnnnnnnnnnnnnnnnnnnnnnnnnnnnnnnnnnnnnnnnnnnnnnnnnnnnnnnnnnnnnnnnnnnnnnnnnnnnnnnnnnnnnnnnnnnnnnnnnnnnnnnnnnnnnnnnnnnnnnnnnnnnnnnnnnnnnnnnnnnnnnnnnnnnnnnnnnnnnnnnnnnnnnnnnnnnnnnnnnnnnnnnnnnnnnnnnnnnnnnnnnnnnnnnnnnnnnnnnnnnnnnnnnnnnnnnnnnnnnnnnnnnnnnnnnnnnnnnnnnnnnnnnnnnnnnnnnnnnnnnnnnnnnnnnnnnnnnnnnnnnnnnnnnnnnnnnnnnnnnnnnnnnnnnnnnnnnnnnnnnnnnnnnnnnnnnnnnnnnnnnnnnnnnnnnnnnnnnnnnnnnnnnnnnnnnnnnnnnnnnnnnnnnnnnnnnnnnnnnnnnnnnnnnnnnnnnnnnnnnnnnnnnnnnnnnnnnnnnnnnnnnnnnnnnnnnnnnnnnnnnnnnnnnnnnnnnnnnnnnnnnnnnnnnnnnnnnnnnnnnnnnnnnnnnnnnnnnnnnnnnnnnnnnnnnnnnnnnnnnnnnnnnnnnnnnnnnnnnnnnnnnnnnnnnnnnnnnnnnnnnnnnnnnnnnnnnnnnnnnnnnnnnnnnnnnnnnnnnnnnnnnnnnnnnnnnnnnnnnnnnnnnnnnnnnnnnnnnnnnnnnnnnnnnnnnnnnnnnnnnnnnnnnnnnnnnnnnnnnnnnnnnnnnnnnnnnnnnnnnnnnnnnnnnnnnnnnnnnnnnnnnnnnnnnnnnnnnnnnnnnnnnnnnnnnnnnnnnnnnnnnnnnnnnnnnnnnnnnnnnnnnnnnnnnnnnnnnnnnnnnnnnnnnnnnnnnnnnnnnnnnnnnnnnnnnnnnnnnnnnnnnnnnnnnnnnnnnnnnnnnnnnnnnnnnnnnnnnnnnnnnnnnnnnnnnnnnnnnnnnnnnnnnnnnnnnnnnnnnnnnnnnnnnnnnnnnnnnnnnnnnnnnnnnnnnnnnnnnnnnnnnnnnnnnnnnnnnnnnnnnnnnnnnnnnnnnnnnnnnnnnnnnnnnnnnnnnnnnnnnnnnnnnnnnnnnnnnnnnnnnnnnnnnnnnnnnnnnnnnnnnnnnnnnnnnnnnnnnnnnnnnnnnnnnnnnnnnnnnnnnnnnnnnnnnnnnnnnnnnnnnnnnnnnnnnnnnnnnnnnnnnnnnnnnnnnnnnnnnnnnnnnnnnnnnnnnnnnnnnnnnnnnnnnnnnnnnnnnnnnnnnnnnnnnnnnnnnnnnnnnnnnnnnnnnnnnnnnnnnnnnnnnnnnnnnnnnnnnnnnnnnnnnnnnnnnnnnnnnnnnnnnnnnnnnnnnnnnnnnnnnnnnnnnnnnnnnnnnnnnnnnnnnnnnnnnnnnnnnnnnnnnnnnnnnnnnnnnnnnnnnnnnnnnnnnnnnnnnnnnnnnnnnnnnnnnnnnnnnnnnnnnnnnnnnnnnnnnnnnnnnnnnnnnnnnnnnnnnnnnnnnnnnnnnnnnnnnnnnnnnnnnnnnnnnnnnnnnnnnnnnnnnnnnnnnnnnnnnnnnnnnnnnnnnnnnnnnnnnnnnnnnnnnnnnnnnnnnnnnnnnnnnnnnnnnnnnnnnnnnnnnnnnnnnnnnnnnnnnnnnnnnnnnnnnnnnnnnnnnnnnnnnnnnnnnnnnnnnnnnnnnnnnnnnnnnnnnnnnnnnnnnnnnnnnnnnnnnnnnnnnnnnnnnnnnnnnnnnnnnnnnnnnnnnnnnnnnnnnnnnnnnnnnnnnnnnnnnnnnnnnnnnnnnnnnnnnnnnnnnnnnnnnnnnnnnnnnnnnnnnnnnnnnnnnnnnnnnnnnnnnnnnnnnnnnnnnnnnnnnnnnnnnnnnnnnnnnnnnnnnnnnnnnnnnnnnnnnnnnnnnnnnnnnnnnnnnnnnnnnnnnnnnnnnnnnnnnnnnnnnnnnnnnnnnnnnnnnnnnnnnnnnnnnnnnnnnnnnnnnnnnnnnnnnnnnnnnnnnnnnnnnnnnnnnnnnnnnnnnnnnnnnnnnnnnnnnnnnnnnnnnnnnnnnnnnnnnnnnnnnnnnnnnnnnnnnnnnnnnnnnnnnnnnnnnnnnnnnnnnnnnnnnnnnnnnnnnnnnnnnnnnnnnnnnnnnnnnnnnnnnnnnnnnnnnnnnnnnnnnnnnnnnnnnnnnnnnnnnnnnnnnnnnnnnnnnnnnnnnnnnnnnnnnnnnnnnnnnnnnnnnnnnnnnnnnnnnnnnnnnnnnnnnnnnnnnnnnnnnnnnnnnnnnnnnnnnnnnnnnnnnnnnnnnnnnnnnnnnnnnnnnnnnnnnnnnnnnnnnnnnnnnnnnnnnnnnnnnnnnnnnnnnnnnnnnnnnnnnnnnnnnnnnnnnnnnnnnnnnnnnnnnnnnnnnnnnnnnnnnnnnnnnnnnnnnnnnnnnnnnnnnnnnnnnnnnnnnnnnnnnnnnnnnnnnnnnnnnnnnnnnnnnnnnnnnnnnnnnnnnnnnnnnnnnnnnnnnnnnnnnnnnnnnnnnnnnnnnnnnnnnnnnnnnnnnnnnnnnnnnnnnnnnnnnnnnnnnnnnnnnnnnnnnnnnnnnnnnnnnnnnnnnnnnnnnnnnnnnnnnnnnnnnnnnnnnnnnnnnnnnnnnnnnnnnnnnnnnnnnnnnnnnnnnnnnnnnnnnnnnnnnnnnnnnnnnnnnnnnnnnnnnnnnnnnnnnnnnnnnnnnnnnnnnnnnnnnnnnnnnnnnnnnnnnnnnnnnnnnnnnnnnnnnnnnnnnnnnnnnnnnnnnnnnnnnnnnnnnnnnnnnnnnnnnnnnnnnnnnnnnnnnnnnnnnnnnnnnnnnnnnnnnnnnnnnnnnnnnnnnnnnnnnnnnnnnnnnnnnnnnnnnnnnnnnnnnnnnnnnnnnnnnnnnnnnnnnnnnnnnnnnnnnnnnnnnnnnnnnnnnnnnnnnnnnnnnnnnnnnnnnnnnnnnnnnnnnnnnnnnnnnnnnnnnnnnnnnnnnnnnnnnnnnnnnnnnnnnnnnnnnnnnnnnnnnnnnnnnnnnnnnnnnnnnnnnnnnnnnnnnnnnnnnnnnnnnnnnnnnnnnnnnnnnnnnnnnnnnnnnnnnnnnnnnnnnnnnnnnnnnnnnnnnnnnnnnnnnnnnnnnnnnnnnnnnnnnnnnnnnnnnnnnnnnnnnnnnnnnnnnnnnnnnnnnnnnnnnnnnnnnnnnnnnnnnnnnnnnnnnnnnnnnnnnnnnnnnnnnnnnnnnnnnnnnnnnnnnnnnnnnnnnnnnnnnnnnnnnnnnnnnnnnnnnnnnnnnnnnnnnnnnnnnnnnnnnnnnnnnnnnnnnnnnnnnnnnnnnnnnnnnnnnnnnnnnnnnnnnnnnnnnnnnnnnnnnnnnnnnnnnnnnnnnnnnnnnnnnnnnnnnnnnnnnnnnnnnnnnnnnnnnnnnnnnnnnnnnnnnnnnnnnnnnnnnnnnnnnnnnnnnnnnnnnnnnnnnnnnnnnnnnnnnnnnnnnnnnnnnnnnnnnnnnnnnnnnnnnnnnnnnnnnnnnnnnnnnnnnnnnnnnnnnnnnnnnnnnnnnnnnnnnnnnnnnnnnnnnnnnnnnnnnnnnnnnnnnnnnnnnnnnnnnnnnnnnnnnnnnnnnnnnnnnnnnnnnnnnnnnnnnnnnnnnnnnnnnnnnnnnnnnnnnnnnnnnnnnnnnnnnnnnnnnnnnnnnnnnnnnnnnnnnnnnnnnnnnnnnnnnnnnnnnnnnnnnnnnnnnnnnnnnnnnnnnnnnnnnnnnnnnnnnnnnnnnnnnnnnnnnnnnnnnnnnnnnnnnnnnnnnnnnnnnnnnnnnnnnnnnnnnnnnnnnnnnnnnnnnnnnnnnnnnnnnnnnnnnnnnnnnnnnnnnnnnnnnnnnnnnnnnnnnnnnnnnnnnnnnnnnnnnnnnnnnnnnnnnnnnnnnnnnnnnnnnnnnnnnnnnnnnnnnnnnnnnnnnnnnnnnnnnnnnnnnnnnnnnnnnnnnnnnnnnnnnnnnnnnnnnnnnnnnnnnnnnnnnnnnnnnnnnnnnnnnnnnnnnnnnnnnnnnnnnnnnnnnnnnnnnnnnnnnnnnnnnnnnnnnnnnnnnnnnnnnnnnnnnnnnnnnnnnnnnnnnnnnnnnnnnnnnnnnnnnnnnnnnnnnnnnnnnnnnnnnnnnnnnnnnnnnnnnnnnnnnnnnnnnnnnnnnnnnnnnnnnnnnnnnnnnnnnnnnnnnnnnnnnnnnnnnnnnnnnnnnnnnnnnnnnnnnnnnnnnnnnnnnnnnnnnnnnnnnnnnnnnnnnnnnnnnnnnnnnnnnnnnnnnnnnnnnnnnnnnnnnnnnnnnnnnnnnnnnnnnnnnnnnnnnnnnnnnnnnnnnnnnnnnnnnnnnnnnnnnnnnnnnnnnnnnnnnnnnnnnnnnnnnnnnnnnnnnnnnnnnnnnnnnnnnnnnnnnnnnnnnnnnnnnnnnnnnnnnnnnnnnnnnnnnnnnnnnnnnnnnnnnnnnnnnnnnnnnnnnnnnnnnnnnnnnnnnnnnnnnnnnnnnnnnnnnnnnnnnnnnnnnnnnnnnnnnnnnnnnnnnnnnnnnnnnnnnnnnnnnnnnnnnnnnnnnnnnnnnnnnnnnnnnnnnnnnnnnnnnnnnnnnnnnnnnnnnnnnnnnnnnnnnnnnnnnnnnnnnnnnnnnnnnnnnnnnnnnnnnnnnnnnnnnnnnnnnnnnnnnnnnnnnnnnnnnnnnnnnnnnnnnnnnnnnnnnnnnnnnnnnnnnnnnnnnnnnnnnnnnnnnnnnnnnnnnnnnnnnnnnnnnnnnnnnnnnnnnnnnnnnnnnnnnnnnnnnnnnnnnnnnnnnnnnnnnnnnnnnnnnnnnnnnnnnnnnnnnnnnnnnnnnnnnnnnnnnnnnnnnnnnnnnnnnnnnnnnnnnnnnnnnnnnnnnnnnnnnnnnnnnnnnnnnnnnnnnnnnnnnnnnnnnnnnnnnnnnnnnnnnnnnnnnnnnnnnnnnnnnnnnnnnnnnnnnnnnnnnnnnnnnnnnnnnnnnnnnnnnnnnnnnnnnnnnnnnnnnnnnnnnnnnnnnnnnnnnnnnnnnnnnnnnnnnnnnnnnnnnnnnnnnnnnnnnnnnnnnnnnnnnnnnnnnnnnnnnnnnnnnnnnnnnnnnnnnnnnnnnnnnnnnnnnnnnnnnnnnnnnnnnnnnnnnnnnnnnnnnnnnnnnnnnnnnnnnnnnnnnnnnnnnnnnnnnnnnnnnnnnnnnnnnnnnnnnnnnnnnnnnnnnnnnnnnnnnnnnnnnnnnnnnnnnnnnnnnnnnnnnnnnnnnnnnnnnnnnnnnnnnnnnnnnnnnnnnnnnnnnnnnnnnnnnnnnnnnnnnnnnnnnnnnnnnnnnnnnnnnnnnnnnnnnnnnnnnnnnnnnnnnnnnnnnnnnnnnnnnnnnnnnnnnnnnnnnnnnnnnnnnnnnnnnnnnnnnnnnnnnnnnnnnnnnnnnnnnnnnnnnnnnnnnnnnnnnnnnnnnnnnnnnnnnnnnnnnnnnnnnnnnnnnnnnnnnnnnnnnnnnnnnnnnnnnnnnnnnnnnnnnnnnnnnnnnnnnnnnnnnnnnnnnnnnnnnnnnnnnnnnnnnnnnnnnnnnnnnnnnnnnnnnnnnnnnnnnnnnnnnnnnnnnnnnnnnnnnnnnnnnnnnnnnnnnnnnnnnnnnnnnnnnnnnnnnnnnnnnnnnnnnnnnnnnnnnnnnnnnnnnnnnnnnnnnnnnnnnnnnnnnnnnnnnnnnnnnnnnnnnnnnnnnnnnnnnnnnnnnnnnnnnnnnnnnnnnnnnnnnnnnnnnnnnnnnnnnnnnnnnnnnnnnnnnnnnnnnnnnnnnnnnnnnnnnnnnnnnnnnnnnnnnnnnnnnnnnnnnnnnnnnnnnnnnnnnnnnnnnnnnnnnnnnnnnnnnnnnnnnnnnnnnnnnnnnnnnnnnnnnnnnnnnnnnnnnnnnnnnnnnnnnnnnnnnnnnnnnnnnnnnnnnnnnnnnnnnnnnnnnnnnnnnnnnnnnnnnnnnnnnnnnnnnnnnnnnnnnnnnnnnnnnnnnnnnnnnnnnnnnnnnnnnnnnnnnnnnnnnnnnnnnnnnnnnnnnnnnnnnnnnnnnnnnnnnnnnnnnnnnnnnnnnnnnnnnnnnnnnnnnnnnnnnnnnnnnnnnnnnnnnnnnnnnnnnnnnnnnnnnnnnnnnnnnnnnnnnnnnnnnnnnnnnnnnnnnnnnnnnnnnnnnnnnnnnnnnnnnnnnnnnnnnnnnnnnnnnnnnnnnnnnnnnnnnnnnnnnnnnnnnnnnnnnnnnnnnnnnnnnnnnnnnnnnnnnnnnnnnnnnnnnnnnnnnnnnnnnnnnnnnnnnnnnnnnnnnnnnnnnnnnnnnnnnnnnnnnnnnnnnnnnnnnnnnnnnnnnnnnnnnnnnnnnnnnnnnnnnnnnnnnnnnnnnnnnnnnnnnnnnnnnnnnnnnnnnnnnnnnnnnnnnnnnnnnnnnnnnnnnnnnnnnnnnnnnnnnnnnnnnnnnnnnnnnnnnnnnnnnnnnnnnnnnnnnnnnnnnnnnnnnnnnnnnnnnnnnnnnnnnnnnnnnnnnnnnnnnnnnnnnnnnnnnnnnnnnnnnnnnnnnnnnnnnnnnnnnnnnnnnnnnnnnnnnnnnnnnnnnnnnnnnnnnnnnnnnnnnnnnnnnnnnnnnnnnnnnnnnnnnnnnnnnnnnnnnnnnnnnnnnnnnnnnnnnnnnnnnnnnnnnnnnnnnnnnnnnnnnnnnnnnnnnnnnnnnnnnnnnnnnnnnnnnnnnnnnnnnnnnnnnnnnnnnnnnnnnnnnnnnnnnnnnnnnnnnnnnnnnnnnnnnnnnnnnnnnnnnnnnnnnnnnnnnnnnnnnnnnnnnnnnnnnnnnnnnnnnnnnnnnnnnnnnnnnnnnnnnnnnnnnnnnnnnnnnnnnnnnnnnnnnnnnnnnnnnnnnnnnnnnnnnnnnnnnnnnnnnnnnnnnnnnnnnnnnnnnnnnnnnnnnnnnnnnnnnnnnnnnnnnnnnnnnnnnnnnnnnnnnnnnnnnnnnnnnnnnnnnnnnnnnnnnnnnnnnnnnnnnnnnnnnnnnnnnnnnnnnnnnnnnnnnnnnnnnnnnnnnnnnnnnnnnnnnnnnnnnnnnnnnnnnnnnnnnnnnnnnnnnnnnnnnnnnnnnnnnnnnnnnnnnnnnnnnnnnnnnnnnnnnnnnnnnnnnnnnnnnnnnnnnnnnnnnnnnnnnnnnnnnnnnnnnnnnnnnnnnnnnnnnnnnnnnnnnnnnnnnnnnnnnnnnnnnnnnnnnnnnnnnnnnnnnnnnnnnnnnnnnnnnnnnnnnnnnnnnnnnnnnnnnnnnnnnnnnnnnnnnnnnnnnnnnnnnnnnnnnnnnnnnnnnnnnnnnnnnnnnnnnnnnnnnnnnnnnnnnnnnnnnnnnnnnnnnnnnnnnnnnnnnnnnnnnnnnnnnnnnnnnnnnnnnnnnnnnnnnnnnnnnnnnnnnnnnnnnnnnnnnnnnnnnnnnnnnnnnnnnnnnnnnnnnnnnnnnnnnnnnnnnnnnnnnnnnnnnnnnnnnnnnnnnnnnnnnnnnnnnnnnnnnnnnnnnnnnnnnnnnnnnnnnnnnnnnnnnnnnnnnnnnnnnnnnnnnnnnnnnnnnnnnnnnnnnnnnnnnnnnnnnnnnnnnnnnnnnnnnnnnnnnnnnnnnnnnnnnnnnnnnnnnnnnnnnnnnnnnnnnnnnnnnnnnnnnnnnnnnnnnnnnnnnnnnnnnnnnnnnnnnnnnnnnnnnnnnnnnnnnnnnnnnnnnnnnnnnnnnnnnnnnnnnnnnnnnnnnnnnnnnnnnnnnnnnnnnnnnnnnnnnnnnnnnnnnnnnnnnnnnnnnnnnnnnnnnnnnnnnnnnnnnnnnnnnnnnnnnnnnnnnnnnnnnnnnnnnnnnnnnnnnnnnnnnnnnnnnnnnnnnnnnnnnnnnnnnnnnnnnnnnnnnnnnnnnnnnnnnnnnnnnnnnnnnnnnnnnnnnnnnnnnnnnnnnnnnnnnnnnnnnnnnnnnnnnnnnnnnnnnnnnnnnnnnnnnnnnnnnnnnnnnnnnnnnnnnnnnnnnnnnnnnnnnnnnnnnnnnnnnnnnnnnnnnnnnnnnnnnnnnnnnnnnnnnnnnnnnnnnnnnnnnnnnnnnnnnnnnnnnnnnnnnnnnnnnnnnnnnnnnnnnnnnnnnnnnnnnnnnnnnnnnnnnnnnnnnnnnnnnnnnnnnnnnnnnnnnnnnnnnnnnnnnnnnnnnnnnnnnnnnnnnnnnnnnnnnnnnnnnnnnnnnnnnnnnnnnnnnnnnnnnnnnnnnnnnnnnnnnnnnnnnnnnnnnnnnnnnnnnnnnnnnnnnnnnnnnnnnnnnnnnnnnnnnnnnnnnnnnnnnnnnnnnnnnnnnnnnnnnnnnnnnnnnnnnnnnnnnnnnnnnnnnnnnnnnnnnnnnnnnnnnnnnnnnnnnnnnnnnnnnnnnnnnnnnnnnnnnnnnnnnnnnnnnnnnnnnnnnnnnnnnnnnnnnnnnnnnnnnnnnnnnnnnnnnnnnnnnnnnnnnnnnnnnnnnnnnnnnnnnnnnnnnnnnnnnnnnnnnnnnnnnnnnnnnnnnnnnnnnnnnnnnnnnnnnnnnnnnnnnnnnnnnnnnnnnnnnnnnnnnnnnnnnnnnnnnnnnnnnnnnnnnnnnnnnnnnnnnnnnnnnnnnnnnnnnnnnnnnnnnnnnnnnnnnnnnnnnnnnnnnnnnnnnnnnnnnnnnnnnnnnnnnnnnnnnnnnnnnnnnnnnnnnnnnnnnnnnnnnnnnnnnnnnnnnnnnnnnnnnnnnnnnnnnnnnnnnnnnnnnnnnnnnnnnnnnnnnnnnnnnnnnnnnnnnnnnnnnnnnnnnnnnnnnnnnnnnnnnnnnnnnnnnnnnnnnnnnnnnnnnnnnnnnnnnnnnnnnnnnnnnnnnnnnnnnnnnnnnnnnnnnnnnnnnnnnnnnnnnnnnnnnnnnnnnnnnnnnnnnnnnnnnnnnnnnnnnnnnnnnnnnnnnnnnnnnnnnnnnnnnnnnnnnnnnnnnnnnnnnnnnnnnnnnnnnnnnnnnnnnnnnnnnnnnnnnnnnnnnnnnnnnnnnnnnnnnnnnnnnnnnnnnnnnnnnnnnnnnnnnnnnnnnnnnnnnnnnnnnnnnnnnnnnnnnnnnnnnnnnnnnnnnnnnnnnnnnnnnnnnnnnnnnnnnnnnnnnnnnnnnnnnnnnnnnnnnnnnnnnnnnnnnnnnnnnnnnnnnnnnnnnnnnnnnnnnnnnnnnnnnnnnnnnnnnnnnnnnnnnnnnnnnnnnnnnnnnnnnnnnnnnnnnnnnnnnnnnnnnnnnnnnnnnnnnnnnnnnnnnnnnnnnnnnnnnnnnnnnnnnnnnnnnnnnnnnnnnnnnnnnnnnnnnnnnnnnnnnnnnnnnnnnnnnnnnnnnnnnnnnnnnnnnnnnnnnnnnnnnnnnnnnnnnnnnnnnnnnnnnnnnnnnnnnnnnnnnnnnnnnnnnnnnnnnnnnnnnnnnnnnnnnnnnnnnnnnnnnnnnnnnnnnnnnnnnnnnnnnnnnnnnnnnnnnnnnnnnnnnnnnnnnnnnnnnnnnnnnnnnnnnnnnnnnnnnnnnnnnnnnnnnnnnnnnnnnnnnnnnnnnnnnnnnnnnnnnnnnnnnnnnnnnnnnnnnnnnnnnnnnnnnnnnnnnnnnnnnnnnnnnnnnnnnnnnnnnnnnnnnnnnnnnnnnnnnnnnnnnnnnnnnnnnnnnnnnnnnnnnnnnnnnnnnnnnnnnnnnnnnnnnnnnnnnnnnnnnnnnnnnnnnnnnnnnnnnnnnnnnnnnnnnnnnnnnnnnnnnnnnnnnnnnnnnnnnnnnnnnnnnnnnnnnnnnnnnnnnnnnnnnnnnnnnnnnnnnnnnnnnnnnnnnnnnnnnnnnnnnnnnnnnnnnnnnnnnnnnnnnnnnnnnnnnnnnnnnnnnnnnnnnnnnnnnnnnnnnnnnnnnnnnnnnnnnnnnnnnnnnnnnnnnnnnnnnnnnnnnnnnnnnnnnnnnnnnnnnnnnnnnnnnnnnnnnnnnnnnnnnnnnnnnnnnnnnnnnnnnnnnnnnnnnnnnnnnnnnnnnnnnnnnnnnnnnnnnnnnnnnnnnnnnnnnnnnnnnnnnnnnnnnnnnnnnnnnnnnnnnnnnnnnnnnnnnnnnnnnnnnnnnnnnnnnnnnnnnnnnnnnnnnnnnnnnnnnnnnnnnnnnnnnnnnnnnnnnnnnnnnnnnnnnnnnnnnnnnnnnnnnnnnnnnnnnnnnnnnnnnnnnnnnnnnnnnnnnnnnnnnnnnnnnnnnnnnnnnnnnnnnnnnnnnnnnnnnnnnnnnnnnnnnnnnnnnnnnnnnnnnnnnnnnnnnnnnnnnnnnnnnnnnnnnnnnnnnnnnnnnnnnnnnnnnnnnnnnnnnnnnnnnnnnnnnnnnnnnnnnnnnnnnnnnnnnnnnnnnnnnnnnnnnnnnnnnnnnnnnnnnnnnnnnnnnnnnnnnnnnnnnnnnnnnnnnnnnnnnnnnnnnnnnnnnnnnnnnnnnnnnnnnnnnnnnnnnnnnnnnnnnnnnnnnnnnnnnnnnnnnnnnnnnnnnnnnnnnnnnnnnnnnnnnnnnnnnnnnnnnnnnnnnnnnnnnnnnnnnnnnnnnnnnnnnnnnnnnnnnnnnnnnnnnnnnnnnnnnnnnnnnnnnnnnnnnnnnnnnnnnnnnnnnnnnnnnnnnnnnnnnnnnnnnnnnnnnnnnnnnnnnnnnnnnnnnnnnnnnnnnnnnnnnnnnnnnnnnnnnnnnnnnnnnnnnnnnnnnnnnnnnnnnnnnnnnnnnnnnnnnnnnnnnnnnnnnnnnnnnnnnnnnnnnnnnnnnnnnnnnnnnnnnnnnnnnnnnnnnnnnnnnnnnnnnnnnnnnnnnnnnnnnnnnnnnnnnnnnnnnnnnnnnnnnnnnnnnnnnnnnnnnnnnnnnnnnnnnnnnnnnnnnnnnnnnnnnnnnnnnnnnnnnnnnnnnnnnnnnnnnnnnnnnnnnnnnnnnnnnnnnnnnnnnnnnnnnnnnnnnnnnnnnnnnnnnnnnnnnnnnnnnnnnnnnnnnnnnnnnnnnnnnnnnnnnnnnnnnnnnnnnnnnnnnnnnnnnnnnnnnnnnnnnnnnnnnnnnnnnnnnnnnnnnnnnnnnnnnnnnnnnnnnnnnnnnnnnnnnnnnnnnnnnnnnnnnnnnnnnnnnnnnnnnnnnnnnnnnnnnnnnnnnnnnnnnnnnnnnnnnnnnnnnnnnnnnnnnnnnnnnnnnnnnnnnnnnnnnnnnnnnnnnnnnnnnnnnnnnnnnnnnnnnnnnnnnnnnnnnnnnnnnnnnnnnnnnnnnnnnnnnnnnnnnnnnnnnnnnnnnnnnnnnnnnnnnnnnnnnnnnnnnnnnnnnnnnnnnnnnnnnnnnnnnnnnnnnnnnnnnnnnnnnnnnnnnnnnnnnnnnnnnnnnnnnnnnnnnnnnnnnnnnnnnnnnnnnnnnnnnnnnnnnnnnnnnnnnnnnnnnnnnnnnnnnnnnnnnnnnnnnnnnnnnnnnnnnnnnnnnnnnnnnnnnnnnnnnnnnnnnnnnnnnnnnnnnnnnnnnnnnnnnnnnnnnnnnnnnnnnnnnnnnnnnnnnnnnnnnnnnnnnnnnnnnnnnnnnnnnnnnnnnnnnnnnnnnnnnnnnnnnnnnnnnnnnnnnnnnnnnnnnnnnnnnnnnnnnnnnnnnnnnnnnnnnnnnnnnnnnnnnnnnnnnnnnnnnnnnnnnnnnnnnnnnnnnnnnnnnnnnnnnnnnnnnnnnnnnnnnnnnnnnnnnnnnnnnnnnnnnnnnnnnnnnnnnnnnnnnnnnnnnnnnnnnnnnnnnnnnnnnnnnnnnnnnnnnnnnnnnnnnnnnnnnnnnnnnnnnnnnnnnnnnnnnnnnnnnnnnnnnnnnnnnnnnnnnnnnnnnnnnnnnnnnnnnnnnnnnnnnnnnnnnnnnnnnnnnnnnnnnnnnnnnnnnnnnnnnnnnnnnnnnnnnnnnnnnnnnnnnnnnnnnnnnnnnnnnnnnnnnnnnnnnnnnnnnnnnnnnnnnnnnnnnnnnnnnnnnnnnnnnnnnnnnnnnnnnnnnnnnnnnnnnnnnnnnnnnnnnnnnnnnnnnnnnnnnnnnnnnnnnnnnnnnnnnnnnnnnnnnnnnnnnnnnnnnnnnnnnnnnnnnnnnnnnnnnnnnnnnnnnnnnnnnnnnnnnnnnnnnnnnnnnnnnnnnnnnnnnnnnnnnnnnnnnnnnnnnnnnnnnnnnnnnnnnnnnnnnnnnnnnnnnnnnnnnnnnnnnnnnnnnnnnnnnnnnnnnnnnnnnnnnnnnnnnnnnnnnnnnnnnnnnnnnnnnnnnnnnnnnnnnnnnnnnnnnnnnnnnnnnnnnnnnnnnnnnnnnnnnnnnnnnnnnnnnnnnnnnnnnnnnnnnnnnnnnnnnnnnnnnnnnnnnnnnnnnnnnnnnnnnnnnnnnnnnnnnnnnnnnnnnnnnnnnnnnnnnnnnnnnnnnnnnnnnnnnnnnnnnnnnnnnnnnnnnnnnnnnnnnnnnnnnnnnnnnnnnnnnnnnnnnnnnnnnnnnnnnnnnnnnnnnnnnnnnnnnnnnnnnnnnnnnnnnnnnnnnnnnnnnnnnnnnnnnnnnnnnnnnnnnnnnnnnnnnnnnnnnnnnnnnnnnnnnnnnnnnnnnnnnnnnnnnnnnnnnnnnnnnnnnnnnnnnnnnnnnnnnnnnnnnnnnnnnnnnnnnnnnnnnnnnnnnnnnnnnnnnnnnnnnnnnnnnnnnnnnnnnnnnnnnnnnnnnnnnnnnnnnnnnnnnnnnnnnnnnnnnnnnnnnnnnnnnnnnnnnnnnnnnnnnnnnnnnnnnnnnnnnnnnnnnnnnnnnnnnnnnnnnnnnnnnnnnnnnnnnnnnnnnnnnnnnnnnnnnnnnnnnnnnnnnnnnnnnnnnnnnnnnnnnnnnnnnnnnnnnnnnnnnnnnnnnnnnnnnnnnnnnnnnnnnnnnnnnnnnnnnnnnnnnnnnnnnnnnnnnnnnnnnnnnnnnnnnnnnnnnnnnnnnnnnnnnnnnnnnnnnnnnnnnnnnnnnnnnnnnnnnnnnnnnnnnnnnnnnnnnnnnnnnnnnnnnnnnnnnnnnnnnnnnnnnnnnnnnnnnnnnnnnnnnnnnnnnnnnnnnnnnnnnnnnnnnnnnnnnnnnnnnnnnnnnnnnnnnnnnnnnnnnnnnnnnnnnnnnnnnnnnnnnnnnnnnnnnnnnnnnnnnnnnnnnnnnnnnnnnnnnnnnnnnnnnnnnnnnnnnnnnnnnnnnnnnnnnnnnnnnnnnnnnnnnnnnnnnnnnnnnnnnnnnnnnnnnnnnnnnnnnnnnnnnnnnnnnnnnnnnnnnnnnnnnnnnnnnnnnnnnnnnnnnnnnnnnnnnnnnnnnnnnnnnnnnnnnnnnnnnnnnnnnnnnnnnnnnnnnnnnnnnnnnnnnnnnnnnnnnnnnnnnnnnnnnnnnnnnnnnnnnnnnnnnnnnnnnnnnnnnnnnnnnnnnnnnnnnnnnnnnnnnnnnnnnnnnnnnnnnnnnnnnnnnnnnnnnnnnnnnnnnnnnnnnnnnnnnnnnnnnnnnnnnnnnnnnnnnnnnnnnnnnnnnnnnnnnnnnnnnnnnnnnnnnnnnnnnnnnnnnnnnnnnnnnnnnnnnnnnnnnnnnnnnnnnnnnnnnnnnnnnnnnnnnnnnnnnnnnnnnnnnnnnnnnnnnnnnnnnnnnnnnnnnnnnnnnnnnnnnnnnnnnnnnnnnnnnnnnnnnnnnnnnnnnnnnnnnnnnnnnnnnnnnnnnnnnnnnnnnnnnnnnnnnnnnnnnnnnnnnnnnnnnnnnnnnnnnnnnnnnnnnnnnnnnnnnnnnnnnnnnnnnnnnnnnnnnnnnnnnnnnnnnnnnnnnnnnnnnnnnnnnnnnnnnnnnnnnnnnnnnnnnnnnnnnnnnnnnnnnnnnnnnnnnnnnnnnnnnnnnnnnnnnnnnnnnnnnnnnnnnnnnnnnnnnnnnnnnnnnnnnnnnnnnnnnnnnnnnnnnnnnnnnnnnnnnnnnnnnnnnnnnnnnnnnnnnnnnnnnnnnnnnnnnnnnnnnnnnnnnnnnnnnnnnnnnnnnnnnnnnnnnnnnnnnnnnnnnnnnnnnnnnnnnnnnnnnnnnnnnnnnnnnnnnnnnnnnnnnnnnnnnnnnnnnnnnnnnnnnnnnnnnnnnnnnnnnnnnnnnnnnnnnnnnnnnnnnnnnnnnnnnnnnnnnnnnnnnnnnnnnnnnnnnnnnnnnnnnnnnnnnnnnnnnnnnnnnnnnnnnnnnnnnnnnnnnnnnnnnnnnnnnnnnnnnnnnnnnnnnnnnnnnnnnnnnnnnnnnnnnnnnnnnnnnnnnnnnnnnnnnnnnnnnnnnnnnnnnnnnnnnnnnnnnnnnnnnnnnnnnnnnnnnnnnnnnnnnnnnnnnnnnnnnnnnnnnnnnnnnnnnnnnnnnnnnnnnnnnnnnnnnnnnnnnnnnnnnnnnnnnnnnnnnnnnnnnnnnnnnnnnnnnnnnnnnnnnnnnnnnnnnnnnnnnnnnnnnnnnnnnnnnnnnnnnnnnnnnnnnnnnnnnnnnnnnnnnnnnnnnnnnnnnnnnnnnnnnnnnnnnnnnnnnnnnnnnnnnnnnnnnnnnnnnnnnnnnnnnnnnnnnnnnnnnnnnnnnnnnnnnnnnnnnnnnnnnnnnnnnnnnnnnnnnnnnnnnnnnnnnnnnnnnnnnnnnnnnnnnnnnnnnnnnnnnnnnnnnnnnnnnnnnnnnnnnnnnnnnnnnnnnnnnnnnnnnnnnnnnnnnnnnnnnnnnnnnnnnnnnnnnnnnnnnnnnnnnnnnnnnnnnnnnnnnnnnnnnnnnnnnnnnnnnnnnnnnnnnnnnnnnnnnnnnnnnnnnnnnnnnnnnnnnnnnnnnnnnnnnnnnnnnnnnnnnnnnnnnnnnnnnnnnnnnnnnnnnnnnnnnnnnnnnnnnnnnnnnnnnnnnnnnnnnnnnnnnnnnnnnnnnnnnnnnnnnnnnnnnnnnnnnnnnnnnnnnnnnnnnnnnnnnnnnnnnnnnnnnnnnnnnnnnnnnnnnnnnnnnnnnnnnnnnnnnnnnnnnnnnnnnnnnnnnnnnnnnnnnnnnnnnnnnnnnnnnnnnnnnnnnnnnnnnnnnnnnnnnnnnnnnnnnnnnnnnnnnnnnnnnnnnnnnnnnnnnnnnnnnnnnnnnnnnnnnnnnnnnnnnnnnnnnnnnnnnnnnnnnnnnnnnnnnnnnnnnnnnnnnnnnnnnnnnnnnnnnnnnnnnnnnnnnnnnnnnnnnnnnnnnnnnnnnnnnnnnnnnnnnnnnnnnnnnnnnnnnnnnnnnnnnnnnnnnnnnnnnnnnnnnnnnnnnnnnnnnnnnnnnnnnnnnnnnnnnnnnnnnnnnnnnnnnnnnnnnnnnnnnnnnnnnnnnnnnnnnnnnnnnnnnnnnnnnnnnnnnnnnnnnnnnnnnnnnnnnnnnnnnnnnnnnnnnnnnnnnnnnnnnnnnnnnnnnnnnnnnnnnnnnnnnnnnnnnnnnnnnnnnnnnnnnnnnnnnnnnnnnnnnnnnnnnnnnnnnnnnnnnnnnnnnnnnnnnnnnnnnnnnnnnnnnnnnnnnnnnnnnnnnnnnnnnnnnnnnnnnnnnnnnnnnnnnnnnnnnnnnnnnnnnnnnnnnnnnnnnnnnnnnnnnnnnnnnnnnnnnnnnnnnnnnnnnnnnnnnnnnnnnnnnnnnnnnnnnnnnnnnnnnnnnnnnnnnnnnnnnnnnnnnnnnnnnnnnnnnnnnnnnnnnnnnnnnnnnnnnnnnnnnnnnnnnnnnnnnnnnnnnnnnnnnnnnnnnnnnnnnnnnnnnnnnnnnnnnnnnnnnnnnnnnnnnnnnnnnnnnnnnnnnnnnnnnnnnnnnnnnnnnnnnnnnnnnnnnnnnnnnnnnnnnnnnnnnnnnnnnnnnnnnnnnnnnnnnnnnnnnnnnnnnnnnnnnnnnnnnnnnnnnnnnnnnnnnnnnnnnnnnnnnnnnnnnnnnnnnnnnnnnnnnnnnnnnnnnnnnnnnnnnnnnnnnnnnnnnnnnnnnnnnnnnnnnnnnnnnnnnnnnnnnnnnnnnnnnnnnnnnnnnnnnnnnnnnnnnnnnnnnnnnnnnnnnnnnnnnnnnnnnnnnnnnnnnnnnnnnnnnnnnnnnnnnnnnnnnnnnnnnnnnnnnnnnnnnnnnnnnnnnnnnnnnnnnnnnnnnnnnnnnnnnnnnnnnnnnnnnnnnnnnnnnnnnnnnnnnnnnnnnnnnnnnnnnnnnnnnnnnnnnnnnnnnnnnnnnnnnnnnnnnnnnnnnnnnnnnnnnnnnnnnnnnnnnnnnnnnnnnnnnnnnnnnnnnnnnnnnnnnnnnnnnnnnnnnnnnnnnnnnnnnnnnnnnnnnnnnnnnnnnnnnnnnnnnnnnnnnnnnnnnnnnnnnnnnnnnnnnnnnnnnnnnnnnnnnnnnnnnnnnnnnnnnnnnnnnnnnnnnnnnnnnnnnnnnnnnnnnnnnnnnnnnnnnnnnnnnnnnnnnnnnnnnnnnnnnnnnnnnnnnnnnnnnnnnnnnnnnnnnnnnnnnnnnnnnnnnnnnnnnnnnnnnnnnnnnnnnnnnnnnnnnnnnnnnnnnnnnnnnnnnnnnnnnnnnnnnnnnnnnnnnnnnnnnnnnnnnnnnnnnnnnnnnnnnnnnnnnnnnnnnnnnnnnnnnnnnnnnnnnnnnnnnnnnnnnnnnnnnnnnnnnnnnnnnnnnnnnnnnnnnnnnnnnnnnnnnnnnnnnnnnnnnnnnnnnnnnnnnnnnnnnnnnnnnnnnnnnnnnnnnnnnnnnnnnnnnnnnnnnnnnnnnnnnnnnnnnnnnnnnnnnnnnnnnnnnnnnnnnnnnnnnnnnnnnnnnnnnnnnnnnnnnnnnnnnnnnnnnnnnnnnnnnnnnnnnnnnnnnnnnnnnnnnnnnnnnnnnnnnnnnnnnnnnnnnnnnnnnnnnnnnnnnnnnnnnnnnnnnnnnnnnnnnnnnnnnnnnnnnnnnnnnnnnnnnnnnnnnnnnnnnnnnnnnnnnnnnnnnnnnnnnnnnnnnnnnnnnnnnnnnnnnnnnnnnnnnnnnnnnnnnnnnnnnnnnnnnnnnnnnnnnnnnnnnnnnnnnnnnnnnnnnnnnnnnnnnnnnnnnnnnnnnnnnnnnnnnnnnnnnnnnnnnnnnnnnnnnnnnnnnnnnnnnnnnnnnnnnnnnnnnnnnnnnnnnnnnnnnnnnnnnnnnnnnnnnnnnnnnnnnnnnnnnnnnnnnnnnnnnnnnnnnnnnnnnnnnnnnnnnnnnnnnnnnnnnnnnnnnnnnnnnnnnnnnnnnnnnnnnnnnnnnnnnnnnnnnnnnnnnnnnnnnnnnnnnnnnnnnnnnnnnnnnnnnnnnnnnnnnnnnnnnnnnnnnnnnnnnnnnnnnnnnnnnnnnnnnnnnnnnnnnnnnnnnnnnnnnnnnnnnnnnnnnnnnnnnnnnnnnnnnnnnnnnnnnnnnnnnnnnnnnnnnnnnnnnnnnnnnnnnnnnnnnnnnnnnnnnnnnnnnnnnnnnnnnnnnnnnnnnnnnnnnnnnnnnnnnnnnnnnnnnnnnnnnnnnnnnnnnnnnnnnnnnnnnnnnnnnnnnnnnnnnnnnnnnnnnnnnnnnnnnnnnnnnnnnnnnnnnnnnnnnnnnnnnnnnnnnnnnnnnnnnnnnnnnnnnnnnnnnnnnnnnnnnnnnnnnnnnnnnnnnnnnnnnnnnnnnnnnnnnnnnnnnnnnnnnnnnnnnnnnnnnnnnnnnnnnnnnnnnnnnnnnnnnnnnnnnnnnnnnnnnnnnnnnnnnnnnnnnnnnnnnnnnnnnnnnnnnnnnnnnnnnnnnnnnnnnnnnnnnnnnnnnnnnnnnnnnnnnnnnnnnnnnnnnnnnnnnnnnnnnnnnnnnnnnnnnnnnnnnnnnnnnnnnnnnnnnnnnnnnnnnnnnnnnnnnnnnnnnnnnnnnnnnnnnnnnnnnnnnnnnnnnnnnnnnnnnnnnnnnnnnnnnnnnnnnnnnnnnnnnnnnnnnnnnnnnnnnnnnnnnnnnnnnnnnnnnnnnnnnnnnnnnnnnnnnnnnnnnnnnnnnnnnnnnnnnnnnnnnnnnnnnnnnnnnnnnnnnnnnnnnnnnnnnnnnnnnnnnnnnnnnnnnnnnnnnnnnnnnnnnnnnnnnnnnnnnnnnnnnnnnnnnnnnnnnnnnnnnnnnnnnnnnnnnnnnnnnnnnnnnnnnnnnnnnnnnnnnnnnnnnnnnnnnnnnnnnnnnnnnnnnnnnnnnnnnnnnnnnnnnnnnnnnnnnnnnnnnnnnnnnnnnnnnnnnnnnnnnnnnnnnnnnnnnnnnnnnnnnnnnnnnnnnnnnnnnnnnnnnnnnnnnnnnnnnnnnnnnnnnnnnnnnnnnnnnnnnnnnnnnnnnnnnnnnnnnnnnnnnnnnnnnnnnnnnnnnnnnnnnnnnnnnnnnnnnnnnnnnnnnnnnnnnnnnnnnnnnnnnnnnnnnnnnnnnnnnnnnnnnnnnnnnnnnnnnnnnnnnnnnnnnnnnnnnnnnnnnnnnnnnnnnnnnnnnnnnnnnnnnnnnnnnnnnnnnnnnnnnnnnnnnnnnnnnnnnnnnnnnnnnnnnnnnnnnnnnnnnnnnnnnnnnnnnnnnnnnnnnnnnnnnnnnnnnnnnnnnnnnnnnnnnnnnnnnnnnnnnnnnnnnnnnnnnnnnnnnnnnnnnnnnnnnnnnnnnnnnnnnnnnnnnnnnnnnnnnnnnnnnnnnnnnnnnnnnnnnnnnnnnnnnnnnnnnnnnnnnnnnnnnnnnnnnnnnnnnnnnnnnnnnnnnnnnnnnnnnnnnnnnnnnnnnnnnnnnnnnnnnnnnnnnnnnnnnnnnnnnnnnnnnnnnnnnnnnnnnnnnnnnnnnnnnnnnnnnnnnnnnnnnnnnnnnnnnnnnnnnnnnnnnnnnnnnnnnnnnnnnnnnnnnnnnnnnnnnnnnnnnnnnnnnnnnnnnnnnnnnnnnnnnnnnnnnnnnnnnnnnnnnnnnnnnnnnnnnnnnnnnnnnnnnnnnnnnnnnnnnnnnnnnnnnnnnnnnnnnnnnnnnnnnnnnnnnnnnnnnnnnnnnnnnnnnnnnnnnnnnnnnnnnnnnnnnnnnnnnnnnnnnnnnnnnnnnnnnnnnnnnnnnnnnnnnnnnnnnnnnnnnnnnnnnnnnnnnnnnnnnnnnnnnnnnnnnnnnnnnnnnnnnnnnnnnnnnnnnnnnnnnnnnnnnnnnnnnnnnnnnnnnnnnnnnnnnnnnnnnnnnnnnnnnnnnnnnnnnnnnnnnnnnnnnnnnnnnnnnnnnnnnnnnnnnnnnnnnnnnnnnnnnnnnnnnnnnnnnnnnnnnnnnnnnnnnnnnnnnnnnnnnnnnnnnnnnnnnnnnnnnnnnnnnnnnnnnnnnnnnnnnnnnnnnnnnnnnnnnnnnnnnnnnnnnnnnnnnnnnnnnnnnnnnnnnnnnnnnnnnnnnnnnnnnnnnnnnnnnnnnnnnnnnnnnnnnnnnnnnnnnnnnnnnnnnnnnnnnnnnnnnnnnnnnnnnnnnnnnnnnnnnnnnnnnnnnnnnnnnnnnnnnnnnnnnnnnnnnnnnnnnnnnnnnnnnnnnnnnnnnnnnnnnnnnnnnnnnnnnnnnnnnnnnnnnnnnnnnnnnnnnnnnnnnnnnnnnnnnnnnnnnnnnnnnnnnnnnnnnnnnnnnnnnnnnnnnnnnnnnnnnnnnnnnnnnnnnnnnnnnnnnnnnnnnnnnnnnnnnnnnnnnnnnnnnnnnnnnnnnnnnnnnnnnnnnnnnnnnnnnnnnnnnnnnnnnnnnnnnnnnnnnnnnnnnnnnnnnnnnnnnnnnnnnnnnnnnnnnnnnnnnnnnnnnnnnnnnnnnnnnnnnnnnnnnnnnnnnnnnnnnnnnnnnnnnnnnnnnnnnnnnnnnnnnnnnnnnnnnnnnnnnnnnnnnnnnnnnnnnnnnnnnnnnnnnnnnnnnnnnnnnnnnnnnnnnnnnnnnnnnnnnnnnnnnnnnnnnnnnnnnnnnnnnnnnnnnnnnnnnnnnnnnnnnnnnnnnnnnnnnnnnnnnnnnnnnnnnnnnnnnnnnnnnnnnnnnnnnnnnnnnnnnnnnnnnnnnnnnnnnnnnnnnnnnnnnnnnnnnnnnnnnnnnnnnnnnnnnnnnnnnnnnnnnnnnnnnnnnnnnnnnnnnnnnnnnnnnnnnnnnnnnnnnnnnnnnnnnnnnnnnnnnnnnnnnnnnnnnnnnnnnnnnnnnnnnnnnnnnnnnnnnnnnnnnnnnnnnnnnnnnnnnnnnnnnnnnnnnnnnnnnnnnnnnnnnnnnnnnnnnnnnnnnnnnnnnnnnnnnnnnnnnnnnnnnnnnnnnnnnnnnnnnnnnnnnnnnnnnnnnnnnnnnnnnnnnnnnnnnnnnnnnnnnnnnnnnnnnnnnnnnnnnnnnnnnnnnnnnnnnnnnnnnnnnnnnnnnnnnnnnnnnnnnnnnnnnnnnnnnnnnnnnnnnnnnnnnnnnnnnnnnnnnnnnnnnnnnnnnnnnnnnnnnnnnnnnnnnnnnnnnnnnnnnnnnnnnnnnnnnnnnnnnnnnnnnnnnnnnnnnnnnnnnnnnnnnnnnnnnnnnnnnnnnnnnnnnnnnnnnnnnnnnnnnnnnnnnnnnnnnnnnnnnnnnnnnnnnnnnnnnnnnnnnnnnnnnnnnnnnnnnnnnnnnnnnnnnnnnnnnnnnnnnnnnnnnnnnnnnnnnnnnnnnnnnnnnnnnnnnnnnnnnnnnnnnnnnnnnnnnnnnnnnnnnnnnnnnnnnnnnnnnnnnnnnnnnnnnnnnnnnnnnnnnnnnnnnnnnnnnnnnnnnnnnnnnnnnnnnnnnnnnnnnnnnnnnnnnnnnnnnnnnnnnnnnnnnnnnnnnnnnnnnnnnnnnnnnnnnnnnnnnnnnnnnnnnnnnnnnnnnnnnnnnnnnnnnnnnnnnnnnnnnnnnnnnnnnnnnnnnnnnnnnnnnnnnnnnnnnnnnnnnnnnnnnnnnnnnnnnnnnnnnnnnnnnnnnnnnnnnnnnnnnnnnnnnnnnnnnnnnnnnnnnnnnnnnnnnnnnnnnnnnnnnnnnnnnnnnnnnnnnnnnnnnnnnnnnnnnnnnnnnnnnnnnnnnnnnnnnnnnnnnnnnnnnnnnnnnnnnnnnnnnnnnnnnnnnnnnnnnnnnnnnnnnnnnnnnnnnnnnnnnnnnnnnnnnnnnnnnnnnnnnnnnnnnnnnnnnnnnnnnnnnnnnnnnnnnnnnnnnnnnnnnnnnnnnnnnnnnnnnnnnnnnnnnnnnnnnnnnnnnnnnnnnnnnnnnnnnnnnnnnnnnnnnnnnnnnnnnnnnnnnnnnnnnnnnnnnnnnnnnnnnnnnnnnnnnnnnnnnnnnnnnnnnnnnnnnnnnnnnnnnnnnnnnnnnnnnnnnnnnnnnnnnnnnnnnnnnnnnnnnnnnnnnnnnnnnnnnnnnnnnnnnnnnnnnnnnnnnnnnnnnnnnnnnnnnnnnnnnnnnnnnnnnnnnnnnnnnnnnnnnnnnnnnnnnnnnnnnnnnnnnnnnnnnnnnnnnnnnnnnnnnnnnnnnnnnnnnnnnnnnnnnnnnnnnnnnnnnnnnnnnnnnnnnnnnnnnnnnnnnnnnnnnnnnnnnnnnnnnnnnnnnnnnnnnnnnnnnnnnnnnnnnnnnnnnnnnnnnnnnnnnnnnnnnnnnnnnnnnnnnnnnnnnnnnnnnnnnnnnnnnnnnnnnnnnnnnnnnnnnnnnnnnnnnnnnnnnnnnnnnnnnnnnnnnnnnnnnnnnnnnnnnnnnnnnnnnnnnnnnnnnnnnnnnnnnnnnnnnnnnnnnnnnnnnnnnnnnnnnnnnnnnnnnnnnnnnnnnnnnnnnnnnnnnnnnnnnnnnnnnnnnnnnnnnnnnnnnnnnnnnnnnnnnnnnnnnnnnnnnnnnnnnnnnnnnnnnnnnnnnnnnnnnnnnnnnnnnnnnnnnnnnnnnnnnnnnnnnnnnnnnnnnnnnnnnnnnnnnnnnnnnnnnnnnnnnnnnnnnnnnnnnnnnnnnnnnnnnnnnnnnnnnnnnnnnnnnnnnnnnnnnnnnnnnnnnnnnnnnnnnnnnnnnnnnnnnnnnnnnnnnnnnnnnnnnnnnnnnnnnnnnnnnnnnnnnnnnnnnnnnnnnnnnnnnnnnnnnnnnnnnnnnnnnnnnnnnnnnnnnnnnnnnnnnnnnnnnnnnnnnnnnnnnnnnnnnnnnnnnnnnnnnnnnnnnnnnnnnnnnnnnnnnnnnnnnnnnnnnnnnnnnnnnnnnnnnnnnnnnnnnnnnnnnnnnnnnnnnnnnnnnnnnnnnnnnnnnnnnnnnnnnnnnnnnnnnnnnnnnnnnnnnnnnnnnnnnnnnnnnnnnnnnnnnnnnnnnnnnnnnnnnnnnnnnnnnnnnnnnnnnnnnnnnnnnnnnnnnnnnnnnnnnnnnnnnnnnnnnnnnnnnnnnnnnnnnnnnnnnnnnnnnnnnnnnnnnnnnnnnnnnnnnnnnnnnnnnnnnnnnnnnnnnnnnnnnnnnnnnnnnnnnnnnnnnnnnnnnnnnnnnnnnnnnnnnnnnnnnnnnnnnnnnnnnnnnnnnnnnnnnnnnnnnnnnnnnnnnnnnnnnnnnnnnnnnnnnnnnnnnnnnnnnnnnnnnnnnnnnnnnnnnnnnnnnnnnnnnnnnnnnnnnnnnnnnnnnnnnnnnnnnnnnnnnnnnnnnnnnnnnnnnnnnnnnnnnnnnnnnnnnnnnnnnnnnnnnnnnnnnnnnnnnnnnnnnnnnnnnnnnnnnnnnnnnnnnnnnnnnnnnnnnnnnnnnnnnnnnnnnnnnnnnnnnnnnnnnnnnnnnnnnnnnnnnnnnnnnnnnnnnnnnnnnnnnnnnnnnnnnnnnnnnnnnnnnnnnnnnnnnnnnnnnnnnnnnnnnnnnnnnnnnnnnnnnnnnnnnnnnnnnnnnnnnnnnnnnnnnnnnnnnnnnnnnnnnnnnnnnnnnnnnnnnnnnnnnnnnnnnnnnnnnnnnnnnnnnnnnnnnnnnnnnnnnnnnnnnnnnnnnnnnnnnnnnnnnnnnnnnnnnnnnnnnnnnnnnnnnnnnnnnnnnnnnnnnnnnnnnnnnnnnnnnnnnnnnnnnnnnnnnnnnnnnnnnnnnnnnnnnnnnnnnnnnnnnnnnnnnnnnnnnnnnnnnnnnnnnnnnnnnnnnnnnnnnnnnnnnnnnnnnnnnnnnnnnnnnnnnnnnnnnnnnnnnnnnnnnnnnnnnnnnnnnnnnnnnnnnnnnnnnnnnnnnnnnnnnnnnnnnnnnnnnnnnnnnnnnnnnnnnnnnnnnnnnnnnnnnnnnnnnnnnnnnnnnnnnnnnnnnnnnnnnnnnnnnnnnnnnnnnnnnnnnnnnnnnnnnnnnnnnnnnnnnnnnnnnnnnnnnnnnnnnnnnnnnnnnnnnnnnnnnnnnnnnnnnnnnnnnnnnnnnnnnnnnnnnnnnnnnnnnnnnnnnnnnnnnnnnnnnnnnnnnnnnnnnnnnnnnnnnnnnnnnnnnnnnnnnnnnnnnnnnnnnnnnnnnnnnnnnnnnnnnnnnnnnnnnnnnnnnnnnnnnnnnnnnnnnnnnnnnnnnnnnnnnnnnnnnnnnnnnnnnnnnnnnnnnnnnnnnnnnnnnnnnnnnnnnnnnnnnnnnnnnnnnnnnnnnnnnnnnnnnnnnnnnnnnnnnnnnnnnnnnnnnnnnnnnnnnnnnnnnnnnnnnnnnnnnnnnnnnnnnnnnnnnnnnnnnnnnnnnnnnnnnnnnnnnnnnnnnnnnnnnnnnnnnnnnnnnnnnnnnnnnnnnnnnnnnnnnnnnnnnnnnnnnnnnnnnnnnnnnnnnnnnnnnnnnnnnnnnnnnnnnnnnnnnnnnnnnnnnnnnnnnnnnnnnnnnnnnnnnnnnnnnnnnnnnnnnnnnnnnnnnnnnnnnnnnnnnnnnnnnnnnnnnnnnnnnnnnnnnnnnnnnnnnnnnnnnnnnnnnnnnnnnnnnnnnnnnnnnnnnnnnnnnnnnnnnnnnnnnnnnnnnnnnnnnnnnnnnnnnnnnnnnnnnnnnnnnnnnnnnnnnnnnnnnnnnnnnnnnnnnnnnnnnnnnnnnnnnnnnnnnnnnnnnnnnnnnnnnnnnnnnnnnnnnnnnnnnnnnnnnnnnnnnnnnnnnnnnnnnnnnnnnnnnnnnnnnnnnnnnnnnnnnnnnnnnnnnnnnnnnnnnnnnnnnnnnnnnnnnnnnnnnnnnnnnnnnnnnnnnnnnnnnnnnnnnnnnnnnnnnnnnnnnnnnnnnnnnnnnnnnnnnnnnnnnnnnnnnnnnnnnnnnnnnnnnnnnnnnnnnnnnnnnnnnnnnnnnnnnnnnnnnnnnnnnnnnnnnnnnnnnnnnnnnnnnnnnnnnnnnnnnnnnnnnnnnnnnnnnnnnnnnnnnnnnnnnnnnnnnnnnnnnnnnnnnnnnnnnnnnnnnnnnnnnnnnnnnnnnnnnnnnnnnnnnnnnnnnnnnnnnnnnnnnnnnnnnnnnnnnnnnnnnnnnnnnnnnnnnnnnnnnnnnnnnnnnnnnnnnnnnnnnnnnnnnnnnnnnnnnnnnnnnnnnnnnnnnnnnnnnnnnnnnnnnnnnnnnnnnnnnnnnnnnnnnnnnnnnnnnnnnnnnnnnnnnnnnnnnnnnnnnnnnnnnnnnnnnnnnnnnnnnnnnnnnnnnnnnnnnnnnnnnnnnnnnnnnnnnnnnnnnnnnnnnnnnnnnnnnnnnnnnnnnnnnnnnnnnnnnnnnnnnnnnnnnnnnnnnnnnnnnnnnnnnnnnnnnnnnnnnnnnnnnnnnnnnnnnnnnnnnnnnnnnnnnnnnnnnnnnnnnnnnnnnnnnnnnnnnnnnnnnnnnnnnnnnnnnnnnnnnnnnnnnnnnnnnnnnnnnnnnnnnnnnnnnnnnnnnnnnnnnnnnnnnnnnnnnnnnnnnnnnnnnnnnnnnnnnnnnnnnnnnnnnnnnnnnnnnnnnnnnnnnnnnnnnnnnnnnnnnnnnnnnnnnnnnnnnnnnnnnnnnnnnnnnnnnnnnnnnnnnnnnnnnnnnnnnnnnnnnnnnnnnnnnnnnnnnnnnnnnnnnnnnnnnnnnnnnnnnnnnnnnnnnnnnnnnnnnnnnnnnnnnnnnnnnnnnnnnnnnnnnnnnnnnnnnnnnnnnnnnnnnnnnnnnnnnnnnnnnnnnnnnnnnnnnnnnnnnnnnnnnnnnnnnnnnnnnnnnnnnnnnnnnnnnnnnnnnnnnnnnnnnnnnnnnnnnnnnnnnnnnnnnnnnnnnnnnnnnnnnnnnnnnnnnnnnnnnnnnnnnnnnnnnnnnnnnnnnnnnnnnnnnnnnnnnnnnnnnnnnnnnnnnnnnnnnnnnnnnnnnnnnnnnnnnnnnnnnnnnnnnnnnnnnnnnnnnnnnnnnnnnnnnnnnnnnnnnnnnnnnnnnnnnnnnnnnnnnnnnnnnnnnnnnnnnnnnnnnnnnnnnnnnnnnnnnnnnnnnnnnnnnnnnnnnnnnnnnnnnnnnnnnnnnnnnnnnnnnnnnnnnnnnnnnnnnnnnnnnnnnnnnnnnnnnnnnnnnnnnnnnnnnnnnnnnnnnnnnnnnnnnnnnnnnnnnnnnnnnnnnnnnnnnnnnnnnnnnnnnnnnnnnnnnnnnnnnnnnnnnnnnnnnnnnnnnnnnnnnnnnnnnnnnnnnnnnnnnnnnnnnnnnnnnnnnnnnnnnnnnnnnnnnnnnnnnnnnnnnnnnnnnnnnnnnnnnnnnnnnnnnnnnnnnnnnnnnnnnnnnnnnnnnnnnnnnnnnnnnnnnnnnnnnnnnnnnnnnnnnnnnnnnnnnnnnnnnnnnnnnnnnnnnnnnnnnnnnnnnnnnnnnnnnnnnnnnnnnnnnnnnnnnnnnnnnnnnnnnnnnnnnnnnnnnnnnnnnnnnnnnnnnnnnnnnnnnnnnnnnnnnnnnnnnnnnnnnnnnnnnnnnnnnnnnnnnnnnnnnnnnnnnnnnnnnnnnnnnnnnnnnnnnnnnnnnnnnnnnnnnnnnnnnnnnnnnnnnnnnnnnnnnnnnnnnnnnnnnnnnnnnnnnnnnnnnnnnnnnnnnnnnnnnnnnnnnnnnnnnnnnnnnnnnnnnnnnnnnnnnnnnnnnnnnnnnnnnnnnnnnnnnnnnnnnnnnnnnnnnnnnnnnnnnnnnnnnnnnnnnnnnnnnnnnnnnnnnnnnnnnnnnnnnnnnnnnnnnnnnnnnnnnnnnnnnnnnnnnnnnnnnnnnnnnnnnnnnnnnnnnnnnnnnnnnnnnnnnnnnnnnnnnnnnnnnnnnnnnnnnnnnnnnnnnnnnnnnnnnnnnnnnnnnnnnnnnnnnnnnnnnnnnnnnnnnnnnnnnnnnnnnnnnnnnnnnnnnnnnnnnnnnnnnnnnnnnnnnnnnnnnnnnnnnnnnnnnnnnnnnnnnnnnnnnnnnnnnnnnnnnnnnnnnnnnnnnnnnnnnnnnnnnnnnnnnnnnnnnnnnnnnnnnnnnnnnnnnnnnnnnnnnnnnnnnnnnnnnnnnnnnnnnnnnnnnnnnnnnnnnnnnnnnnnnnnnnnnnnnnnnnnnnnnnnnnnnnnnnnnnnnnnnnnnnnnnnnnnnnnnnnnnnnnnnnnnnnnnnnnnnnnnnnnnnnnnnnnnnnnnnnnnnnnnnnnnnnnnnnnnnnnnnnnnnnnnnnnnnnnnnnnnnnnnnnnnnnnnnnnnnnnnnnnnnnnnnnnnnnnnnnnnnnnnnnnnnnnnnnnnnnnnnnnnnnnnnnnnnnnnnnnnnnnnnnnnnnnnnnnnnnnnnnnnnnnnnnnnnnnnnnnnnnnnnnnnnnnnnnnnnnnnnnnnnnnnnnnnnnnnnnnnnnnnnnnnnnnnnnnnnnnnnnnnnnnnnnnnnnnnnnnnnnnnnnnnnnnnnnnnnnnnnnnnnnnnnnnnnnnnnnnnnnnnnnnnnnnnnnnnnnnnnnnnnnnnnnnnnnnnnnnnnnnnnnnnnnnnnnnnnnnnnnnnnnnnnnnnnnnnnnnnnnnnnnnnnnnnnnnnnnnnnnnnnnnnnnnnnnnnnnnnnnnnnnnnnnnnnnnnnnnnnnnnnnnnnnnnnnnnnnnnnnnnnnnnnnnnnnnnnnnnnnnnnnnnnnnnnnnnnnnnnnnnnnnnnnnnnnnnnnnnnnnnnnnnnnnnnnnnnnnnnnnnnnnnnnnnnnnnnnnnnnnnnnnnnnnnnnnnnnnnnnnnnnnnnnnnnnnnnnnnnnnnnnnnnnnnnnnnnnnnnnnnnnnnnnnnnnnnnnnnnnnnnnnnnnnnnnnnnnnnnnnnnnnnnnnnnnnnnnnnnnnnnnnnnnnnnnnnnnnnnnnnnnnnnnnnnnnnnnnnnnnnnnnnnnnnnnnnnnnnnnnnnnnnnnnnnnnnnnnnnnnnnnnnnnnnnnnnnnnnnnnnnnnnnnnnnnnnnnnnnnnnnnnnnnnnnnnnnnnnnnnnnnnnnnnnnnnnnnnnnnnnnnnnnnnnnnnnnnnnnnnnnnnnnnnnnnnnnnnnnnnnnnnnnnnnnnnnnnnnnnnnnnnnnnnnnnnnnnnnnnnnnnnnnnnnnnnnnnnnnnnnnnnnnnnnnnnnnnnnnnnnnnnnnnnnnnnnnnnnnnnnnnnnnnnnnnnnnnnnnnnnnnnnnnnnnnnnnnnnnnnnnnnnnnnnnnnnnnnnnnnnnnnnnnnnnnnnnnnnnnnnnnnnnnnnnnnnnnnnnnnnnnnnnnnnnnnnnnnnnnnnnnnnnnnnnnnnnnnnnnnnnnnnnnnnnnnnnnnnnnnnnnnnnnnnnnnnnnnnnnnnnnnnnnnnnnnnnnnnnnnnnnnnnnnnnnnnnnnnnnnnnnnnnnnnnnnnnnnnnnnnnnnnnnnnnnnnnnnnnnnnnnnnnnnnnnnnnnnnnnnnnnnnnnnnnnnnnnnnnnnnnnnnnnnnnnnnnnnnnnnnnnnnnnnnnnnnnnnnnnnnnnnnnnnnnnnnnnnnnnnnnnnnnnnnnnnnnnnnnnnnnnnnnnnnnnnnnnnnnnnnnnnnnnnnnnnnnnnnnnnnnnnnnnnnnnnnnnnnnnnnnnnnnnnnnnnnnnnnnnnnnnnnnnnnnnnnnnnnnnnnnnnnnnnnnnnnnnnnnnnnnnnnnnnnnnnnnnnnnnnnnnnnnnnnnnnnnnnnnnnnnnnnnnnnnnnnnnnnnnnnnnnnnnnnnnnnnnnnnnnnnnnnnnnnnnnnnnnnnnnnnnnnnnnnnnnnnnnnnnnnnnnnnnnnnnnnnnnnnnnnnnnnnnnnnnnnnnnnnnnnnnnnnnnnnnnnnnnnnnnnnnnnnnnnnnnnnnnnnnnnnnnnnnnnnnnnnnnnnnnnnnnnnnnnnnnnnnnnnnnnnnnnnnnnnnnnnnnnnnnnnnnnnnnnnnnnnnnnnnnnnnnnnnnnnnnnnnnnnnnnnnnnnnnnnnnnnnnnnnnnnnnnnnnnnnnnnnnnnnnnnnnnnnnnnnnnnnnnnnnnnnnnnnnnnnnnnnnnnnnnnnnnnnnnnnnnnnnnnnnnnnnnnnnnnnnnnnnnnnnnnnnnnnnnnnnnnnnnnnnnnnnnnnnnnnnnnnnnnnnnnnnnnnnnnnnnnnnnnnnnnnnnnnnnnnnnnnnnnnnnnnnnnnnnnnnnnnnnnnnnnnnnnnnnnnnnnnnnnnnnnnnnnnnnnnnnnnnnnnnnnnnnnnnnnnnnnnnnnnnnnnnnnnnnnnnnnnnnnnnnnnnnnnnnnnnnnnnnnnnnnnnnnnnnnnnnnnnnnnnnnnnnnnnnnnnnnnnnnnnnnnnnnnnnnnnnnnnnnnnnnnnnnnnnnnnnnnnnnnnnnnnnnnnnnnnnnnnnnnnnnnnnnnnnnnnnnnnnnnnnnnnnnnnnnnnnnnnnnnnnnnnnnnnnnnnnnnnnnnnnnnnnnnnnnnnnnnnnnnnnnnnnnnnnnnnnnnnnnnnnnnnnnnnnnnnnnnnnnnnnnnnnnnnnnnnnnnnnnnnnnnnnnnnnnnnnnnnnnnnnnnnnnnnnnnnnnnnnnnnnnnnnnnnnnnnnnnnnnnnnnnnnnnnnnnnnnnnnnnnnnnnnnnnnnnnnnnnnnnnnnnnnnnnnnnnnnnnnnnnnnnnnnnnnnnnnnnnnnnnnnnnnnnnnnnnnnnnnnnnnnnnnnnnnnnnnnnnnnnnnnnnnnnnnnnnnnnnnnnnnnnnnnnnnnnnnnnnnnnnnnnnnnnnnnnnnnnnnnnnnnnnnnnnnnnnnnnnnnnnnnnnnnnnnnnnnnnnnnnnnnnnnnnnnnnnnnnnnnnnnnnnnnnnnnnnnnnnnnnnnnnnnnnnnnnnnnnnnnnnnnnnnnnnnnnnnnnnnnnnnnnnnnnnnnnnnnnnnnnnnnnnnnnnnnnnnnnnnnnnnnnnnnnnnnnnnnnnnnnnnnnnnnnnnnnnnnnnnnnnnnnnnnnnnnnnnnnnnnnnnnnnnnnnnnnnnnnnnnnnnnnnnnnnnnnnnnnnnnnnnnnnnnnnnnnnnnnnnnnnnnnnnnnnnnnnnnnnnnnnnnnnnnnnnnnnnnnnnnnnnnnnnnnnnnnnnnnnnnnnnnnnnnnnnnnnnnnnnnnnnnnnnnnnnnnnnnnnnnnnnnnnnnnnnnnnnnnnnnnnnnnnnnnnnnnnnnnnnnnnnnnnnnnnnnnnnnnnnnnnnnnnnnnnnnnnnnnnnnnnnnnnnnnnnnnnnnnnnnnnnnnnnnnnnnnnnnnnnnnnnnnnnnnnnnnnnnnnnnnnnnnnnnnnnnnnnnnnnnnnnnnnnnnnnnnnnnnnnnnnnnnnnnnnnnnnnnnnnnnnnnnnnnnnnnnnnnnnnnnnnnnnnnnnnnnnnnnnnnnnnnnnnnnnnnnnnnnnnnnnnnnnnnnnnnnnnnnnnnnnnnnnnnnnnnnnnnnnnnnnnnnnnnnnnnnnnnnnnnnnnnnnnnnnnnnnnnnnnnnnnnnnnnnnnnnnnnnnnnnnnnnnnnnnnnnnnnnnnnnnnnnnnnnnnnnnnnnnnnnnnnnnnnnnnnnnnnnnnnnnnnnnnnnnnnnnnnnnnnnnnnnnnnnnnnnnnnnnnnnnnnnnnnnnnnnnnnnnnnnnnnnnnnnnnnnnnnnnnnnnnnnnnnnnnnnnnnnnnnnnnnnnnnnnnnnnnnnnnnnnnnnnnnnnnnnnnnnnnnnnnnnnnnnnnnnnnnnnnnnnnnnnnnnnnnnnnnnnnnnnnnnnnnnnnnnnnnnnnnnnnnnnnnnnnnnnnnnnnnnnnnnnnnnnnnnnnnnnnnnnnnnnnnnnnnnnnnnnnnnnnnnnnnnnnnnnnnnnnnnnnnnnnnnnnnnnnnnnnnnnnnnnnnnnnnnnnnnnnnnnnnnnnnnnnnnnnnnnnnnnnnnnnnnnnnnnnnnnnnnnnnnnnnnnnnnnnnnnnnnnnnnnnnnnnnnnnnnnnnnnnnnnnnnnnnnnnnnnnnnnnnnnnnnnnnnnnnnnnnnnnnnnnnnnnnnnnnnnnnnnnnnnnnnnnnnnnnnnnnnnnnnnnnnnnnnnnnnnnnnnnnnnnnnnnnnnnnnnnnnnnnnnnnnnnnnnnnnnnnnnnnnnnnnnnnnnnnnnnnnnnnnnnnnnnnnnnnnnnnnnnnnnnnnnnnnnnnnnnnnnnnnnnnnnnnnnnnnnnnnnnnnnnnnnnnnnnnnnnnnnnnnnnnnnnnnnnnnnnnnnnnnnnnnnnnnnnnnnnnnnnnnnnnnnnnnnnnnnnnnnnnnnnnnnnnnnnnnnnnnnnnnnnnnnnnnnnnnnnnnnnnnnnnnnnnnnnnnnnnnnnnnnnnnnnnnnnnnnnnnnnnnnnnnnnnnnnnnnnnnnnnnnnnnnnnnnnnnnnnnnnnnnnnnnnnnnnnnnnnnnnnnnnnnnnnnnnnnnnnnnnnnnnnnnnnnnnnnnnnnnnnnnnnnnnnnnnnnnnnnnnnnnnnnnnnnnnnnnnnnnnnnnnnnnnnnnnnnnnnnnnnnnnnnnnnnnnnnnnnnnnnnnnnnnnnnnnnnnnnnnnnnnnnnnnnnnnnnnnnnnnnnnnnnnnnnnnnnnnnnnnnnnnnnnnnnnnnnnnnnnnnnnnnnnnnnnnnnnnnnnnnnnnnnnnnnnnnnnnnnnnnnnnnnnnnnnnnnnnnnnnnnnnnnnnnnnnnnnnnnnnnnnnnnnnnnnnnnnnnnnnnnnnnnnnnnnnnnnnnnnnnnnnnnnnnnnnnnnnnnnnnnnnnnnnnnnnnnnnnnnnnnnnnnnnnnnnnnnnnnnnnnnnnnnnnnnnnnnnnnnnnnnnnnnnnnnnnnnnnnnnnnnnnnnnnnnnnnnnnnnnnnnnnnnnnnnnnnnnnnnnnnnnnnnnnnnnnnnnnnnnnnnnnnnnnnnnnnnnnnnnnnnnnnnnnnnnnnnnnnnnnnnnnnnnnnnnnnnnnnnnnnnnnnnnnnnnnnnnnnnnnnnnnnnnnnnnnnnnnnnnnnnnnnnnnnnnnnnnnnnnnnnnnnnnnnnnnnnnnnnnnnnnnnnnnnnnnnnnnnnnnnnnnnnnnnnnnnnnnnnnnnnnnnnnnnnnnnnnnnnnnnnnnnnnnnnnnnnnnnnnnnnnnnnnnnnnnnnnnnnnnnnnnnnnnnnnnnnnnnnnnnnnnnnnnnnnnnnnnnnnnnnnnnnnnnnnnnnnnnnnnnnnnnnnnnnnnnnnnnnnnnnnnnnnnnnnnnnnnnnnnnnnnnnnnnnnnnnnnnnnnnnnnnnnnnnnnnnnnnnnnnnnnnnnnnnnnnnnnnnnnnnnnnnnnnnnnnnnnnnnnnnnnnnnnnnnnnnnnnnnnnnnnnnnnnnnnnnnnnnnnnnnnnnnnnnnnnnnnnnnnnnnnnnnnnnnnnnnnnnnnnnnnnnnnnnnnnnnnnnnnnnnnnnnnnnnnnnnnnnnnnnnnnnnnnnnnnnnnnnnnnnnnnnnnnnnnnnnnnnnnnnnnnnnnnnnnnnnnnnnnnnnnnnnnnnnnnnnnnnnnnnnnnnnnnnnnnnnnnnnnnnnnnnnnnnnnnnnnnnnnnnnnnnnnnnnnnnnnnnnnnnnnnnnnnnnnnnnnnnnnnnnnnnnnnnnnnnnnnnnnnnnnnnnnnnnnnnnnnnnnnnnnnnnnnnnnnnnnnnnnnnnnnnnnnnnnnnnnnnnnnnnnnnnnnnnnnnnnnnnnnnnnnnnnnnnnnnnnnnnnnnnnnnnnnnnnnnnnnnnnnnnnnnnnnnnnnnnnnnnnnnnnnnnnnnnnnnnnnnnnnnnnnnnnnnnnnnnnnnnnnnnnnnnnnnnnnnnnnnnnnnnnnnnnnnnnnnnnnnnnnnnnnnnnnnnnnnnnnnnnnnnnnnnnnnnnnnnnnnnnnnnnnnnnnnnnnnnnnnnnnnnnnnnnnnnnnnnnnnnnnnnnnnnnnnnnnnnnnnnnnnnnnnnnnnnnnnnnnnnnnnnnnnnnnnnnnnnnnnnnnnnnnnnnnnnnnnnnnnnnnnnnnnnnnnnnnnnnnnnnnnnnnnnnnnnnnnnnnnnnnnnnnnnnnnnnnnnnnnnnnnnnnnnnnnnnnnnnnnnnnnnnnnnnnnnnnnnnnnnnnnnnnnnnnnnnnnnnnnnnnnnnnnnnnnnnnnnnnnnnnnnnnnnnnnnnnnnnnnnnnnnnnnnnnnnnnnnnnnnnnnnnnnnnnnnnnnnnnnnnnnnnnnnnnnnnnnnnnnnnnnnnnnnnnnnnnnnnnnnnnnnnnnnnnnnnnnnnnnnnnnnnnnnnnnnnnnnnnnnnnnnnnnnnnnnnnnnnnnnnnnnnnnnnnnnnnnnnnnnnnnnnnnnnnnnnnnnnnnnnnnnnnnnnnnnnnnnnnnnnnnnnnnnnnnnnnnnnnnnnnnnnnnnnnnnnnnnnnnnnnnnnnnnnnnnnnnnnnnnnnnnnnnnnnnnnnnnnnnnnnnnnnnnnnnnnnnnnnnnnnnnnnnnnnnnnnnnnnnnnnnnnnnnnnnnnnnnnnnnnnnnnnnnnnnnnnnnnnnnnnnnnnnnnnnnnnnnnnnnnnnnnnnnnnnnnnnnnnnnnnnnnnnnnnnnnnnnnnnnnnnnnnnnnnnnnnnnnnnnnnnnnnnnnnnnnnnnnnnnnnnnnnnnnnnnnnnnnnnnnnnnnnnnnnnnnnnnnnnnnnnnnnnnnnnnnnnnnnnnnnnnnnnnnnnnnnnnnnnnnnnnnnnnnnnnnnnnnnnnnnnnnnnnnnnnnnnnnnnnnnnnnnnnnnnnnnnnnnnnnnnnnnnnnnnnnnnnnnnnnnnnnnnnnnnnnnnnnnnnnnnnnnnnnnnnnnnnnnnnnnnnnnnnnnnnnnnnnnnnnnnnnnnnnnnnnnnnnnnnnnnnnnnnnnnnnnnnnnnnnnnnnnnnnnnnnnnnnnnnnnnnnnnnnnnnnnnnnnnnnnnnnnnnnnnnnnnnnnnnnnnnnnnnnnnnnnnnnnnnnnnnnnnnnnnnnnnnnnnnnnnnnnnnnnnnnnnnnnnnnnnnnnnnnnnnnnnnnnnnnnnnnnnnnnnnnnnnnnnnnnnnnnnnnnnnnnnnnnnnnnnnnnnnnnnnnnnnnnnnnnnnnnnnnnnnnnnnnnnnnnnnnnnnnnnnnnnnnnnnnnnnnnnnnnnnnnnnnnnnnnnnnnnnnnnnnnnnnnnnnnnnnnnnnnnnnnnnnnnnnnnnnnnnnnnnnnnnnnnnnnnnnnnnnnnnnnnnnnnnnnnnnnnnnnnnnnnnnnnnnnnnnnnnnnnnnnnnnnnnnnnnnnnnnnnnnnnnnnnnnnnnnnnnnnnnnnnnnnnnnnnnnnnnnnnnnnnnnnnnnnnnnnnnnnnnnnnnnnnnnnnnnnnnnnnnnnnnnnnnnnnnnnnnnnnnnnnnnnnnnnnnnnnnnnnnnnnnnnnnnnnnnnnnnnnnnnnnnnnnnnnnnnnnnnnnnnnnnnnnnnnnnnnnnnnnnnnnnnnnnnnnnnnnnnnnnnnnnnnnnnnnnnnnnnnnnnnnnnnnnnnnnnnnnnnnnnnnnnnnnnnnnnnnnnnnnnnnnnnnnnnnnnnnnnnnnnnnnnnnnnnnnnnnnnnnnnnnnnnnnnnnnnnnnnnnnnnnnnnnnnnnnnnnnnnnnnnnnnnnnnnnnnnnnnnnnnnnnnnnnnnnnnnnnnnnnnnnnnnnnnnnnnnnnnnnnnnnnnnnnnnnnnnnnnnnnnnnnnnnnnnnnnnnnnnnnnnnnnnnnnnnnnnnnnnnnnnnnnnnnnnnnnnnnnnnnnnnnnnnnnnnnnnnnnnnnnnnnnnnnnnnnnnnnnnnnnnnnnnnnnnnnnnnnnnnnnnnnnnnnnnnnnnnnnnnnnnnnnnnnnnnnnnnnnnnnnnnnnnnnnnnnnnnnnnnnnnnnnnnnnnnnnnnnnnnnnnnnnnnnnnnnnnnnnnnnnnnnnnnnnnnnnnnnnnnnnnnnnnnnnnnnnnnnnnnnnnnnnnnnnnnnnnnnnnnnnnnnnnnnnnnnnnnnnnnnnnnnnnnnnnnnnnnnnnnnnnnnnnnnnnnnnnnnnnnnnnnnnnnnnnnnnnnnnnnnnnnnnnnnnnnnnnnnnnnnnnnnnnnnnnnnnnnnnnnnnnnnnnnnnnnnnnnnnnnnnnnnnnnnnnnnnnnnnnnnnnnnnnnnnnnnnnnnnnnnnnnnnnnnnnnnnnnnnnnnnnnnnnnnnnnnnnnnnnnnnnnnnnnnnnnnnnnnnnnnnnnnnnnnnnnnnnnnnnnnnnnnnnnnnnnnnnnnnnnnnnnnnnnnnnnnnnnnnnnnnnnnnnnnnnnnnnnnnnnnnnnnnnnnnnnnnnnnnnnnnnnnnnnnnnnnnnnnnnnnnnnnnnnnnnnnnnnnnnnnnnnnnnnnnnnnnnnnnnnnnnnnnnnnnnnnnnnnnnnnnnnnnnnnnnnnnnnnnnnnnnnnnnnnnnnnnnnnnnnnnnnnnnnnnnnnnnnnnnnnnnnnnnnnnnnnnnnnnnnnnnnnnnnnnnnnnnnnnnnnnnnnnnnnnnnnnnnnnnnnnnnnnnnnnnnnnnnnnnnnnnnnnnnnnnnnnnnnnnnnnnnnnnnnnnnnnnnnnnnnnnnnnnnnnnnnnnnnnnnnnnnnnnnnnnnnnnnnnnnnnnnnnnnnnnnnnnnnnnnnnnnnnnnnnnnnnnnnnnnnnnnnnnnnnnnnnnnnnnnnnnnnnnnnnnnnnnnnnnnnnnnnnnnnnnnnnnnnnnnnnnnnnnnnnnnnnnnnnnnnnnnnnnnnnnnnnnnnnnnnnnnnnnnnnnnnnnnnnnnnnnnnnnnnnnnnnnnnnnnnnnnnnnnnnnnnnnnnnnnnnnnnnnnnnnnnnnnnnnnnnnnnnnnnnnnnnnnnnnnnnnnnnnnnnnnnnnnnnnnnnnnnnnnnnnnnnnnnnnnnnnnnnnnnnnnnnnnnnnnnnnnnnnnnnnnnnnnnnnnnnnnnnnnnnnnnnnnnnnnnnnnnnnnnnnnnnnnnnnnnnnnnnnnnnnnnnnnnnnnnnnnnnnnnnnnnnnnnnnnnnnnnnnnnnnnnnnnnnnnnnnnnnnnnnnnnnnnnnnnnnnnnnnnnnnnnnnnnnnnnnnnnnnnnnnnnnnnnnnnnnnnnnnnnnnnnnnnnnnnnnnnnnnnnnnnnnnnnnnnnnnnnnnnnnnnnnnnnnnnnnnnnnnnnnnnnnnnnnnnnnnnnnnnnnnnnnnnnnnnnnnnnnnnnnnnnnnnnnnnnnnnnnnnnnnnnnnnnnnnnnnnnnnnnnnnnnnnnnnnnnnnnnnnnnnnnnnnnnnnnnnnnnnnnnnnnnnnnnnnnnnnnnnnnnnnnnnnnnnnnnnnnnnnnnnnnnnnnnnnnnnnnnnnnnnnnnnnnnnnnnnnnnnnnnnnnnnnnnnnnnnnnnnnnnnnnnnnnnnnnnnnnnnnnnnnnnnnnnnnnnnnnnnnnnnnnnnnnnnnnnnnnnnnnnnnnnnnnnnnnnnnnnnnnnnnnnnnnnnnnnnnnnnnnnnnnnnnnnnnnnnnnnnnnnnnnnnnnnnnnnnnnnnnnnnnnnnnnnnnnnnnnnnnnnnnnnnnnnnnnnnnnnnnnnnnnnnnnnnnnnnnnnnnnnnnnnnnnnnnnnnnnnnnnnnnnnnnnnnnnnnnnnnnnnnnnnnnnnnnnnnnnnnnnnnnnnnnnnnnnnnnnnnnnnnnnnnnnnnnnnnnnnnnnnnnnnnnnnnnnnnnnnnnnnnnnnnnnnnnnnnnnnnnnnnnnnnnnnnnnnnnnnnnnnnnnnnnnnnnnnnnnnnnnnnnnnnnnnnnnnnnnnnnnnnnnnnnnnnnnnnnnnnnnnnnnnnnnnnnnnnnnnnnnnnnnnnnnnnnnnnnnnnnnnnnnnnnnnnnnnnnnnnnnnnnnnnnnnnnnnnnnnnnnnnnnnnnnnnnnnnnnnnnnnnnnnnnnnnnnnnnnnnnnnnnnnnnnnnnnnnnnnnnnnnnnnnnnnnnnnnnnnnnnnnnnnnnnnnnnnnnnnnnnnnnnnnnnnnnnnnnnnnnnnnnnnnnnnnnnnnnnnnnnnnnnnnnnnnnnnnnnnnnnnnnnnnnnnnnnnnnnnnnnnnnnnnnnnnnnnnnnnnnnnnnnnnnnnnnnnnnnnnnnnnnnnnnnnnnnnnnnnnnnnnnnnnnnnnnnnnnnnnnnnnnnnnnnnnnnnnnnnnnnnnnnnnnnnnnnnnnnnnnnnnnnnnnnnnnnnnnnnnnnnnnnnnnnnnnnnnnnnnnnnnnnnnnnnnnnnnnnnnnnnnnnnnnnnnnnnnnnnnnnnnnnnnnnnnnnnnnnnnnnnnnnnnnnnnnnnnnnnnnnnnnnnnnnnnnnnnnnnnnnnnnnnnnnnnnnnnnnnnnnnnnnnnnnnnnnnnnnnnnnnnnnnnnnnnnnnnnnnnnnnnnnnnnnnnnnnnnnnnnnnnnnnnnnnnnnnnnnnnnnnnnnnnnnnnnnnnnnnnnnnnnnnnnnnnnnnnnnnnnnnnnnnnnnnnnnnnnnnnnnnnnnnnnnnnnnnnnnnnnnnnnnnnnnnnnnnnnnnnnnnnnnnnnnnnnnnnnnnnnnnnnnnnnnnnnnnnnnnnnnnnnnnnnnnnnnnnnnnnnnnnnnnnnnnnnnnnnnnnnnnnnnnnnnnnnnnnnnnnnnnnnnnnnnnnnnnnnnnnnnnnnnnnnnnnnnnnnnnnnnnnnnnnnnnnnnnnnnnnnnnnnnnnnnnnnnnnnnnnnnnnnnnnnnnnnnnnnnnnnnnnnnnnnnnnnnnnnnnnnnnnnnnnnnnnnnnnnnnnnnnnnnnnnnnnnnnnnnnnnnnnnnnnnnnnnnnnnnnnnnnnnnnnnnnnnnnnnnnnnnnnnnnnnnnnnnnnnnnnnnnnnnnnnnnnnnnnnnnnnnnnnnnnnnnnnnnnnnnnnnnnnnnnnnnnnnnnnnnnnnnnnnnnnnnnnnnnnnnnnnnnnnnnnnnnnnnnnnnnnnnnnnnnnnnnnnnnnnnnnnnnnnnnnnnnnnnnnnnnnnnnnnnnnnnnnnnnnnnnnnnnnnnnnnnnnnnnnnnnnnnnnnnnnnnnnnnnnnnnnnnnnnnnnnnnnnnnnnnnnnnnnnnnnnnnnnnnnnnnnnnnnnnnnnnnnnnnnnnnnnnnnnnnnnnnnnnnnnnnnnnnnnnnnnnnnnnnnnnnnnnnnnnnnnnnnnnnnnnnnnnnnnnnnnnnnnnnnnnnnnnnnnnnnnnnnnnnnnnnnnnnnnnnnnnnnnnnnnnnnnnnnnnnnnnnnnnnnnnnnnnnnnnnnnnnnnnnnnnnnnnnnnnnnnnnnnnnnnnnnnnnnnnnnnnnnnnnnnnnnnnnnnnnnnnnnnnnnnnnnnnnnnnnnnnnnnnnnnnnnnnnnnnnnnnnnnnnnnnnnnnnnnnnnnnnnnnnnnnnnnnnnnnnnnnnnnnnnnnnnnnnnnnnnnnnnnnnnnnnnnnnnnnnnnnnnnnnnnnnnnnnnnnnnnnnnnnnnnnnnnnnnnnnnnnnnnnnnnnnnnnnnnnnnnnnnnnnnnnnnnnnnnnnnnnnnnnnnnnnnnnnnnnnnnnnnnnnnnnnnnnnnnnnnnnnnnnnnnnnnnnnnnnnnnnnnnnnnnnnnnnnnnnnnnnnnnnnnnnnnnnnnnnnnnnnnnnnnnnnnnnnnnnnnnnnnnnnnnnnnnnnnnnnnnnnnnnnnnnnnnnnnnnnnnnnnnnnnnnnnnnnnnnnnnnnnnnnnnnnnnnnnnnnnnnnnnnnnnnnnnnnnnnnnnnnnnnnnnnnnnnnnnnnnnnnnnnnnnnnnnnnnnnnnnnnnnnnnnnnnnnnnnnnnnnnnnnnnnnnnnnnnnnnnnnnnnnnnnnnnnnnnnnnnnnnnnnnnnnnnnnnnnnnnnnnnnnnnnnnnnnnnnnnnnnnnnnnnnnnnnnnnnnnnnnnnnnnnnnnnnnnnnnnnnnnnnnnnnnnnnnnnnnnnnnnnnnnnnnnnnnnnnnnnnnnnnnnnnnnnnnnnnnnnnnnnnnnnnnnnnnnnnnnnnnnnnnnnnnnnnnnnnnnnnnnnnnnnnnnnnnnnnnnnnnnnnnnnnnnnnnnnnnnnnnnnnnnnnnnnnnnnnnnnnnnnnnnnnnnnnnnnnnnnnnnnnnnnnnnnnnnnnnnnnnnnnnnnnnnnnnnnnnnnnnnnnnnnnnnnnnnnnnnnnnnnnnnnnnnnnnnnnnnnnnnnnnnnnnnnnnnnnnnnnnnnnnnnnnnnnnnnnnnnnnnnnnnnnnnnnnnnnnnnnnnnnnnnnnnnnnnnnnnnnnnnnnnnnnnnnnnnnnnnnnnnnnnnnnnnnnnnnnnnnnnnnnnnnnnnnnnnnnnnnnnnnnnnnnnnnnnnnnnnnnnnnnnnnnnnnnnnnnnnnnnnnnnnnnnnnnnnnnnnnnnnnnnnnnnnnnnnnnnnnnnnnnnnnnnnnnnnnnnnnnnnnnnnnnnnnnnnnnnnnnnnnnnnnnnnnnnnnnnnnnnnnnnnnnnnnnnnnnnnnnnnnnnnnnnnnnnnnnnnnnnnnnnnnnnnnnnnnnnnnnnnnnnnnnnnnnnnnnnnnnnnnnnnnnnnnnnnnnnnnnnnnnnnnnnnnnnnnnnnnnnnnnnnnnnnnnnnnnnnnnnnnnnnnnnnnnnnnnnnnnnnnnnnnnnnnnnnnnnnnnnnnnnnnnnnnnnnnnnnnnnnnnnnnnnnnnnnnnnnnnnnnnnnnnnnnnnnnnnnnnnnnnnnnnnnnnnnnnnnnnnnnnnnnnnnnnnnnnnnnnnnnnnnnnnnnnnnnnnnnnnnnnnnnnnnnnnnnnnnnnnnnnnnnnnnnnnnnnnnnnnnnnnnnnnnnnnnnnnnnnnnnnnnnnnnnnnnnnnnnnnnnnnnnnnnnnnnnnnnnnnnnnnnnnnnnnnnnnnnnnnnnnnnnnnnnnnnnnnnnnnnnnnnnnnnnnnnnnnnnnnnnnnnnnnnnnnnnnnnnnnnnnnnnnnnnnnnnnnnnnnnnnnnnnnnnnnnnnnnnnnnnnnnnnnnnnnnnnnnnnnnnnnnnnnnnnnnnnnnnnnnnnnnnnnnnnnnnnnnnnnnnnnnnnnnnnnnnnnnnnnnnnnnnnnnnnnnnnnnnnnnnnnnnnnnnnnnnnnnnnnnnnnnnnnnnnnnnnnnnnnnnnnnnnnnnnnnnnnnnnnnnnnnnnnnnnnnnnnnnnnnnnnnnnnnnnnnnnnnnnnnnnnnnnnnnnnnnnnnnnnnnnnnnnnnnnnnnnnnnnnnnnnnnnnnnnnnnnnnnnnnnnnnnnnnnnnnnnnnnnnnnnnnnnnnnnnnnnnnnnnnnnnnnnnnnnnnnnnnnnnnnnnnnnnnnnnnnnnnnnnnnnnnnnnnnnnnnnnnnnnnnnnnnnnnnnnnnnnnnnnnnnnnnnnnnnnnnnnnnnnnnnnnnnnnnnnnnnnnnnnnnnnnnnnnnnnnnnnnnnnnnnnnnnnnnnnnnnnnnnnnnnnnnnnnnnnnnnnnnnnnnnnnnnnnnnnnnnnnnnnnnnnnnnnnnnnnnnnnnnnnnnnnnnnnnnnnnnnnnnnnnnnnnnnnnnnnnnnnnnnnnnnnnnnnnnnnnnnnnnnnnnnnnnnnnnnnnnnnnnnnnnnnnnnnnnnnnnnnnnnnnnnnnnnnnnnnnnnnnnnnnnnnnnnnnnnnnnnnnnnnnnnnnnnnnnnnnnnnnnnnnnnnnnnnnnnnnnnnnnnnnnnnnnnnnnnnnnnnnnnnnnnnnnnnnnnnnnnnnnnnnnnnnnnnnnnnnnnnnnnnnnnnnnnnnnnnnnnnnnnnnnnnnnnnnnnnnnnnnnnnnnnnnnnnnnnnnnnnnnnnnnnnnnnnnnnnnnnnnnnnnnnnnnnnnnnnnnnnnnnnnnnnnnnnnnnnnnnnnnnnnnnnnnnnnnnnnnnnnnnnnnnnnnnnnnnnnnnnnnnnnnnnnnnnnnnnnnnnnnnnnnnnnnnnnnnnnnnnnnnnnnnnnnnnnnnnnnnnnnnnnnnnnnnnnnnnnnnnnnnnnnnnnnnnnnnnnnnnnnnnnnnnnnnnnnnnnnnnnnnnnnnnnnnnnnnnnnnnnnnnnnnnnnnnnnnnnnnnnnnnnnnnnnnnnnnnnnnnnnnnnnnnnnnnnnnnnnnnnnnnnnnnnnnnnnnnnnnnnnnnnnnnnnnnnnnnnnnnnnnnnnnnnnnnnnnnnnnnnnnnnnnnnnnnnnnnnnnnnnnnnnnnnnnnnnnnnnnnnnnnnnnnnnnnnnnnnnnnnnnnnnnnnnnnnnnnnnnnnnnnnnnnnnnnnnnnnnnnnnnnnnnnnnnnnnnnnnnnnnnnnnnnnnnnnnnnnnnnnnnnnnnnnnnnnnnnnnnnnnnnnnnnnnnnnnnnnnnnnnnnnnnnnnnnnnnnnnnnnnnnnnnnnnnnnnnnnnnnnnnnnnnnnnnnnnnnnnnnnnnnnnnnnnnnnnnnnnnnnnnnnnnnnnnnnnnnnnnnnnnnnnnnnnnnnnnnnnnnnnnnnnnnnnnnnnnnnnnnnnnnnnnnnnnnnnnnnnnnnnnnnnnnnnnnnnnnnnnnnnnnnnnnnnnnnnnnnnnnnnnnnnnnnnnnnnnnnnnnnnnnnnnnnnnnnnnnnnnnnnnnnnnnnnnnnnnnnnnnnnnnnnnnnnnnnnnnnnnnnnnnnnnnnnnnnnnnnnnnnnnnnnnnnnnnnnnnnnnnnnnnnnnnnnnnnnnnnnnnnnnnnnnnnnnnnnnnnnnnnnnnnnnnnnnnnnnnnnnnnnnnnnnnnnnnnnnnnnnnnnnnnnnnnnnnnnnnnnnnnnnnnnnnnnnnnnnnnnnnnnnnnnnnnnnnnnnnnnnnnnnnnnnnnnnnnnnnnnnnnnnnnnnnnnnnnnnnnnnnnnnnnnnnnnnnnnnnnnnnnnnnnnnnnnnnnnnnnnnnnnnnnnnnnnnnnnnnnnnnnnnnnnnnnnnnnnnnnnnnnnnnnnnnnnnnnnnnnnnnnnnnnnnnnnnnnnnnnnnnnnnnnnnnnnnnnnnnnnnnnnnnnnnnnnnnnnnnnnnnnnnnnnnnnnnnnnnnnnnnnnnnnnnnnnnnnnnnnnnnnnnnnnnnnnnnnnnnnnnnnnnnnnnnnnnnnnnnnnnnnnnnnnnnnnnnnnnnnnnnnnnnnnnnnnnnnnnnnnnnnnnnnnnnnnnnnnnnnnnnnnnnnnnnnnnnnnnnnnnnnnnnnnnnnnnnnnnnnnnnnnnnnnnnnnnnnnnnnnnnnnnnnnnnnnnnnnnnnnnnnnnnnnnnnnnnnnnnnnnnnnnnnnnnnnnnnnnnnnnnnnnnnnnnnnnnnnnnnnnnnnnnnnnnnnnnnnnnnnnnnnnnnnnnnnnnnnnnnnnnnnnnnnnnnnnnnnnnnnnnnnnnnnnnnnnnnnnnnnnnnnnnnnnnnnnnnnnnnnnnnnnnnnnnnnnnnnnnnnnnnnnnnnnnnnnnnnnnnnnnnnnnnnnnnnnnnnnnnnnnnnnnnnnnnnnnnnnnnnnnnnnnnnnnnnnnnnnnnnnnnnnnnnnnnnnnnnnnnnnnnnnnnnnnnnnnnnnnnnnnnnnnnnnnnnnnnnnnnnnnnnnnnnnnnnnnnnnnnnnnnnnnnnnnnnnnnnnnnnnnnnnnnnnnnnnnnnnnnnnnnnnnnnnnnnnnnnnnnnnnnnnnnnnnnnnnnnnnnnnnnnnnnnnnnnnnnnnnnnnnnnnnnnnnnnnnnnnnnnnnnnnnnnnnnnnnnnnnnnnnnnnnnnnnnnnnnnnnnnnnnnnnnnnnnnnnnnnnnnnnnnnnnnnnnnnnnnnnnnnnnnnnnnnnnnnnnnnnnnnnnnnnnnnnnnnnnnnnnnnnnnnnnnnnnnnnnnnnnnnnnnnnnnnnnnnnnnnnnnnnnnnnnnnnnnnnnnnnnnnnnnnnnnnnnnnnnnnnnnnnnnnnnnnnnnnnnnnnnnnnnnnnnnnnnnnnnnnnnnnnnnnnnnnnnnnnnnnnnnnnnnnnnnnnnnnnnnnnnnnnnnnnnnnnnnnnnnnnnnnnnnnnnnnnnnnnnnnnnnnnnnnnnnnnnnnnnnnnnnnnnnnnnnnnnnnnnnnnnnnnnnnnnnnnnnnnnnnnnnnnnnnnnnnnnnnnnnnnnnnnnnnnnnnnnnnnnnnnnnnnnnnnnnnnnnnnnnnnnnnnnnnnnnnnnnnnnnnnnnnnnnnnnnnnnnnnnnnnnnnnnnnnnnnnnnnnnnnnnnnnnnnnnnnnnnnnnnnnnnnnnnnnnnnnnnnnnnnnnnnnnnnnnnnnnnnnnnnnnnnnnnnnnnnnnnnnnnnnnnnnnnnnnnnnnnnnnnnnnnnnnnnnnnnnnnnnnnnnnnnnnnnnnnnnnnnnnnnnnnnnnnnnnnnnnnnnnnnnnnnnnnnnnnnnnnnnnnnnnnnnnnnnnnnnnnnnnnnnnnnnnnnnnnnnnnnnnnnnnnnnnnnnnnnnnnnnnnnnnnnnnnnnnnnnnnnnnnnnnnnnnnnnnnnnnnnnnnnnnnnnnnnnnnnnnnnnnnnnnnnnnnnnnnnnnnnnnnnnnnnnnnnnnnnnnnnnnnnnnnnnnnnnnnnnnnnnnnnnnnnnnnnnnnnnnnnnnnnnnnnnnnnnnnnnnnnnnnnnnnnnnnnnnnnnnnnnnnnnnnnnnnnnnnnnnnnnnnnnnnnnnnnnnnnnnnnnnnnnnnnnnnnnnnnnnnnnnnnnnnnnnnnnnnnnnnnnnnnnnnnnnnnnnnnnnnnnnnnnnnnnnnnnnnnnnnnnnnnnnnnnnnnnnnnnnnnnnnnnnnnnnnnnnnnnnnnnnnnnnnnnnnnnnnnnnnnnnnnnnnnnnnnnnnnnnnnnnnnnnnnnnnnnnnnnnnnnnnnnnnnnnnnnnnnnnnnnnnnnnnnnnnnnnnnnnnnnnnnnnnnnnnnnnnnnnnnnnnnnnnnnnnnnnnnnnnnnnnnnnnnnnnnnnnnnnnnnnnnnnnnnnnnnnnnnnnnnnnnnnnnnnnnnnnnnnnnnnnnnnnnnnnnnnnnnnnnnnnnnnnnnnnnnnnnnnnnnnnnnnnnnnnnnnnnnnnnnnnnnnnnnnnnnnnnnnnnnnnnnnnnnnnnnnnnnnnnnnnnnnnnnnnnnnnnnnnnnnnnnnnnnnnnnnnnnnnnnnnnnnnnnnnnnnnnnnnnnnnnnnnnnnnnnnnnnnnnnnnnnnnnnnnnnnnnnnnnnnnnnnnnnnnnnnnnnnnnnnnnnnnnnnnnnnnnnnnnnnnnnnnnnnnnnnnnnnnnnnnnnnnnnnnnnnnnnnnnnnnnnnnnnnnnnnnnnnnnnnnnnnnnnnnnnnnnnnnnnnnnnnnnnnnnnnnnnnnnnnnnnnnnnnnnnnnnnnnnnnnnnnnnnnnnnnnnnnnnnnnnnnnnnnnnnnnnnnnnnnnnnnnnnnnnnnnnnnnnnnnnnnnnnnnnnnnnnnnnnnnnnnnnnnnnnnnnnnnnnnnnnnnnnnnnnnnnnnnnnnnnnnnnnnnnnnnnnnnnnnnnnnnnnnnnnnnnnnnnnnnnnnnnnnnnnnnnnnnnnnnnnnnnnnnnnnnnnnnnnnnnnnnnnnnnnnnnnnnnnnnnnnnnnnnnnnnnnnnnnnnnnnnnnnnnnnnnnnnnnnnnnnnnnnnnnnnnnnnnnnnnnnnnnnnnnnnnnnnnnnnnnnnnnnnnnnnnnnnnnnnnnnnnnnnnnnnnnnnnnnnnnnnnnnnnnnnnnnnnnnnnnnnnnnnnnnnnnnnnnnnnnnnnnnnnnnnnnnnnnnnnnnnnnnnnnnnnnnnnnnnnnnnnnnnnnnnnnnnnnnnnnnnnnnnnnnnnnnnnnnnnnnnnnnnnnnnnnnnnnnnnnnnnnnnnnnnnnnnnnnnnnnnnnnnnnnnnnnnnnnnnnnnnnnnnnnnnnnnnnnnnnnnnnnnnnnnnnnnnnnnnnnnnnnnnnnnnnnnnnnnnnnnnnnnnnnnnnnnnnnnnnnnnnnnnnnnnnnnnnnnnnnnnnnnnnnnnnnnnnnnnnnnnnnnnnnnnnnnnnnnnnnnnnnnnnnnnnnnnnnnnnnnnnnnnnnnnnnnnnnnnnnnnnnnnnnnnnnnnnnnnnnnnnnnnnnnnnnnnnnnnnnnnnnnnnnnnnnnnnnnnnnnnnnnnnnnnnnnnnnnnnnnnnnnnnnnnnnnnnnnnnnnnnnnnnnnnnnnnnnnnnnnnnnnnnnnnnnnnnnnnnnnnnnnnnnnnnnnnnnnnnnnnnnnnnnnnnnnnnnnnnnnnnnnnnnnnnnnnnnnnnnnnnnnnnnnnnnnnnnnnnnnnnnnnnnnnnnnnnnnnnnnnnnnnnnnnnnnnnnnnnnnnnnnnnnnnnnnnnnnnnnnnnnnnnnnnnnnnnnnnnnnnnnnnnnnnnnnnnnnnnnnnnnnnnnnnnnnnnnnnnnnnnnnnnnnnnnnnnnnnnnnnnnnnnnnnnnnnnnnnnnnnnnnnnnnnnnnnnnnnnnnnnnnnnnnnnnnnnnnnnnnnnnnnnnnnnnnnnnnnnnnnnnnnnnnnnnnnnnnnnnnnnnnnnnnnnnnnnnnnnnnnnnnnnnnnnnnnnnnnnnnnnnnnnnnnnnnnnnnnnnnnnnnnnnnnnnnnnnnnnnnnnnnnnnnnnnnnnnnnnnnnnnnnnnnnnnnnnnnnnnnnnnnnnnnnnnnnnnnnnnnnnnnnnnnnnnnnnnnnnnnnnnnnnnnnnnnnnnnnnnnnnnnnnnnnnnnnnnnnnnnnnnnnnnnnnnnnnnnnnnnnnnnnnnnnnnnnnnnnnnnnnnnnnnnnnnnnnnnnnnnnnnnnnnnnnnnnnnnnnnnnnnnnnnnnnnnnnnnnnnnnnnnnnnnnnnnnnnnnnnnnnnnnnnnnnnnnnnnnnnnnnnnnnnnnnnnnnnnnnnnnnnnnnnnnnnnnnnnnnnnnnnnnnnnnnnnnnnnnnnnnnnnnnnnnnnnnnnnnnnnnnnnnnnnnnnnnnnnnnnnnnnnnnnnnnnnnnnnnnnnnnnnnnnnnnnnnnnnnnnnnnnnnnnnnnnnnnnnnnnnnnnnnnnnnnnnnnnnnnnnnnnnnnnnnnnnnnnnnnnnnnnnnnnnnnnnnnnnnnnnnnnnnnnnnnnnnnnnnnnnnnnnnnnnnnnnnnnnnnnnnnnnnnnnnnnnnnnnnnnnnnnnnnnnnnnnnnnnnnnnnnnnnnnnnnnnnnnnnnnnnnnnnnnnnnnnnnnnnnnnnnnnnnnnnnnnnnnnnnnnnnnnnnnnnnnnnnnnnnnnnnnnnnnnnnnnnnnnnnnnnnnnnnnnnnnnnnnnnnnnnnnnnnnnnnnnnnnnnnnnnnnnnnnnnnnnnnnnnnnnnnnnnnnnnnnnnnnnnnnnnnnnnnnnnnnnnnnnnnnnnnnnnnnnnnnnnnnnnnnnnnnnnnnnnnnnnnnnnnnnnnnnnnnnnnnnnnnnnnnnnnnnnnnnnnnnnnnnnnnnnnnnnnnnnnnnnnnnnnnnnnnnnnnnnnnnnnnnnnnnnnnnnnnnnnnnnnnnnnnnnnnnnnnnnnnnnnnnnnnnnnnnnnnnnnnnnnnnnnnnnnnnnnnnnnnnnnnnnnnnnnnnnnnnnnnnnnnnnnnnnnnnnnnnnnnnnnnnnnnnnnnnnnnnnnnnnnnnnnnnnnnnnnnnnnnnnnnnnnnnnnnnnnnnnnnnnnnnnnnnnnnnnnnnnnnnnnnnnnnnnnnnnnnnnnnnnnnnnnnnnnnnnnnnnnnnnnnnnnnnnnnnnnnnnnnnnnnnnnnnnnnnnnnnnnnnnnnnnnnnnnnnnnnnnnnnnnnnnnnnnnnnnnnnnnnnnnnnnnnnnnnnnnnnnnnnnnnnnnnnnnnnnnnnnnnnnnnnnnnnnnnnnnnnnnnnnnnnnnnnnnnnnnnnnnnnnnnnnnnnnnnnnnnnnnnnnnnnnnnnnnnnnnnnnnnnnnnnnnnnnnnnnnnnnnnnnnnnnnnnnnnnnnnnnnnnnnnnnnnnnnnnnnnnnnnnnnnnnnnnnnnnnnnnnnnnnnnnnnnnnnnnnnnnnnnnnnnnnnnnnnnnnnnnnnnnnnnnnnnnnnnnnnnnnnnnnnnnnnnnnnnnnnnnnnnnnnnnnnnnnnnnnnnnnnnnnnnnnnnnnnnnnnnnnnnnnnnnnnnnnnnnnnnnnnnnnnnnnnnnnnnnnnnnnnnnnnnnnnnnnnnnnnnnnnnnnnnnnnnnnnnnnnnnnnnnnnnnnnnnnnnnnnnnnnnnnnnnnnnnnnnnnnnnnnnnnnnnnnnnnnnnnnnnnnnnnnnnnnnnnnnnnnnnnnnnnnnnnnnnnnnnnnnnnnnnnnnnnnnnnnnnnnnnnnnnnnnnnnnnnnnnnnnnnnnnnnnnnnnnnnnnnnnnnnnnnnnnnnnnnnnnnnnnnnnnnnnnnnnnnnnnnnnnnnnnnnnnnnnnnnnnnnnnnnnnnnnnnnnnnnnnnnnnnnnnnnnnnnnnnnnnnnnnnnnnnnnnnnnnnnnnnnnnnnnnnnnnnnnnnnnnnnnnnnnnnnnnnnnnnnnnnnnnnnnnnnnnnnnnnnnnnnnnnnnnnnnnnnnnnnnnnnnnnnnnnnnnnnnnnnnnnnnnnnnnnnnnnnnnnnnnnnnnnnnnnnnnnnnnnnnnnnnnnnnnnnnnnnnnnnnnnnnnnnnnnnnnnnnnnnnnnnnnnnnnnnnnnnnnnnnnnnnnnnnnnnnnnnnnnnnnnnnnnnnnnnnnnnnnnnnnnnnnnnnnnnnnnnnnnnnnnnnnnnnnnnnnnnnnnnnnnnnnnnnnnnnnnnnnnnnnnnnnnnnnnnnnnnnnnnnnnnnnnnnnnnnnnnnnnnnnnnnnnnnnnnnnnnnnnnnnnnnnnnnnnnnnnnnnnnnnnnnnnnnnnnnnnnnnnnnnnnnnnnnnnnnnnnnnnnnnnnnnnnnnnnnnnnnnnnnnnnnnnnnnnnnnnnnnnnnnnnnnnnnnnnnnnnnnnnnnnnnnnnnnnnnnnnnnnnnnnnnnnnnnnnnnnnnnnnnnnnnnnnnnnnnnnnnnnnnnnnnnnnnnnnnnnnnnnnnnnnnnnnnnnnnnnnnnnnnnnnnnnnnnnnnnnnnnnnnnnnnnnnnnnnnnnnnnnnnnnnnnnnnnnnnnnnnnnnnnnnnnnnnnnnnnnnnnnnnnnnnnnnnnnnnnnnnnnnnnnnnnnnnnnnnnnnnnnnnnnnnnnnnnnnnnnnnnnnnnnnnnnnnnnnnnnnnnnnnnnnnnnnnnnnnnnnnnnnnnnnnnnnnnnnnnnnnnnnnnnnnnnnnnnnnnnnnnnnnnnnnnnnnnnnnnnnnnnnnnnnnnnnnnnnnnnnnnnnnnnnnnnnnnnnnnnnnnnnnnnnnnnnnnnnnnnnnnnnnnnnnnnnnnnnnnnnnnnnnnnnnnnnnnnnnnnnnnnnnnnnnnnnnnnnnnnnnnnnnnnnnnnnnnnnnnnnnnnnnnnnnnnnnnnnnnnnnnnnnnnnnnnnnnnnnnnnnnnnnnnnnnnnnnnnnnnnnnnnnnnnnnnnnnnnnnnnnnnnnnnnnnnnnnnnnnnnnnnnnnnnnnnnnnnnnnnnnnnnnnnnnnnnnnnnnnnnnnnnnnnnnnnnnnnnnnnnnnnnnnnnnnnnnnnnnnnnnnnnnnnnnnnnnnnnnnnnnnnnnnnnnnnnnnnnnnnnnnnnnnnnnnnnnnnnnnnnnnnnnnnnnnnnnnnnnnnnnnnnnnnnnnnnnnnnnnnnnnnnnnnnnnnnnnnnnnnnnnnnnnnnnnnnnnnnnnnnnnnnnnnnnnnnnnnnnnnnnnnnnnnnnnnnnnnnnnnnnnnnnnnnnnnnnnnnnnnnnnnnnnnnnnnnnnnnnnnnnnnnnnnnnnnnnnnnnnnnnnnnnnnnnnnnnnnnnnnnnnnnnnnnnnnnnnnnnnnnnnnnnnnnnnnnnnnnnnnnnnnnnnnnnnnnnnnnnnnnnnnnnnnnnnnnnnnnnnnnnnnnnnnnnnnnnnnnnnnnnnnnnnnnnnnnnnnnnnnnnnnnnnnnnnnnnnnnnnnnnnnnnnnnnnnnnnnnnnnnnnnnnnnnnnnnnnnnnnnnnnnnnnnnnnnnnnnnnnnnnnnnnnnnnnnnnnnnnnnnnnnnnnnnnnnnnnnnnnnnnnnnnnnnnnnnnnnnnnnnnnnnnnnnnnnnnnnnnnnnnnnnnnnnnnnnnnnnnnnnnnnnnnnnnnnnnnnnnnnnnnnnnnnnnnnnnnnnnnnnnnnnnnnnnnnnnnnnnnnnnnnnnnnnnnnnnnnnnnnnnnnnnnnnnnnnnnnnnnnnnnnnnnnnnnnnnnnnnnnnnnnnnnnnnnnnnnnnnnnnnnnnnnnnnnnnnnnnnnnnnnnnnnnnnnnnnnnnnnnnnnnnnnnnnnnnnnnnnnnnnnnnnnnnnnnnnnnnnnnnnnnnnnnnnnnnnnnnnnnnnnnnnnnnnnnnnnnnnnnnnnnnnnnnnnnnnnnnnnnnnnnnnnnnnnnnnnnnnnnnnnnnnnnnnnnnnnnnnnnnnnnnnnnnnnnnnnnnnnnnnnnnnnnnnnnnnnnnnnnnnnnnnnnnnnnnnnnnnnnnnnnnnnnnnnnnnnnnnnnnnnnnnnnnnnnnnnnnnnnnnnnnnnnnnnnnnnnnnnnnnnnnnnnnnnnnnnnnnnnnnnnnnnnnnnnnnnnnnnnnnnnnnnnnnnnnnnnnnnnnnnnnnnnnnnnnnnnnnnnnnnnnnnnnnnnnnnnnnnnnnnnnnnnnnnnnnnnnnnnnnnnnnnnnnnnnnnnnnnnnnnnnnnnnnnnnnnnnnnnnnnnnnnnnnnnnnnnnnnnnnnnnnnnnnnnnnnnnnnnnnnnnnnnnnnnnnnnnnnnnnnnnnnnnnnnnnnnnnnnnnnnnnnnnnnnnnnnnnnnnnnnnnnnnnnnnnnnnnnnnnnnnnnnnnnnnnnnnnnnnnnnnnnnnnnnnnnnnnnnnnnnnnnnnnnnnnnnnnnnnnnnnnnnnnnnnnnnnnnnnnnnnnnnnnnnnnnnnnnnnnnnnnnnnnnnnnnnnnnnnnnnnnnnnnnnnnnnnnnnnnnnnnnnnnnnnnnnnnnnnnnnnnnnnnnnnnnnnnnnnnnnnnnnnnnnnnnnnnnnnnnnnnnnnnnnnnnnnnnnnnnnnnnnnnnnnnnnnnnnnnnnnnnnnnnnnnnnnnnnnnnnnnnnnnnnnnnnnnnnnnnnnnnnnnnnnnnnnnnnnnnnnnnnnnnnnnnnnnnnnnnnnnnnnnnnnnnnnnnnnnnnnnnnnnnnnnnnnnnnnnnnnnnnnnnnnnnnnnnnnnnnnnnnnnnnnnnnnnnnnnnnnnnnnnnnnnnnnnnnnnnnnnnnnnnnnnnnnnnnnnnnnnnnnnnnnnnnnnnnnnnnnnnnnnnnnnnnnnnnnnnnnnnnnnnnnnnnnnnnnnnnnnnnnnnnnnnnnnnnnnnnnnnnnnnnnnnnnnnnnnnnnnnnnnnnnnnnnnnnnnnnnnnnnnnnnnnnnnnnnnnnnnnnnnnnnnnnnnnnnnnnnnnnnnnnnnnnnnnnnnnnnnnnnnnnnnnnnnnnnnnnnnnnnnnnnnnnnnnnnnnnnnnnnnnnnnnnnnnnnnnnnnnnnnnnnnnnnnnnnnnnnnnnnnnnnnnnnnnnnnnnnnnnnnnnnnnnnnnnnnnnnnnnnnnnnnnnnnnnnnnnnnnnnnnnnnnnnnnnnnnnnnnnnnnnnnnnnnnnnnnnnnnnnnnnnnnnnnnnnnnnnnnnnnnnnnnnnnnnnnnnnnnnnnnnnnnnnnnnnnnnnnnnnnnnnnnnnnnnnnnnnnnnnnnnnnnnnnnnnnnnnnnnnnnnnnnnnnnnnnnnnnnnnnnnnnnnnnnnnnnnnnnnnnnnnnnnnnnnnnnnnnnnnnnnnnnnnnnnnnnnnnnnnnnnnnnnnnnnnnnnnnnnnnnnnnnnnnnnnnnnnnnnnnnnnnnnnnnnnnnnnnnnnnnnnnnnnnnnnnnnnnnnnnnnnnnnnnnnnnnnnnnnnnnnnnnnnnnnnnnnnnnnnnnnnnnnnnnnnnnnnnnnnnnnnnnnnnnnnnnnnnnnnnnnnnnnnnnnnnnnnnnnnnnnnnnnnnnnnnnnnnnnnnnnnnnnnnnnnnnnnnnnnnnnnnnnnnnnnnnnnnnnnnnnnnnnnnnnnnnnnnnnnnnnnnnnnnnnnnnnnnnnnnnnnnnnnnnnnnnnnnnnnnnnnnnnnnnnnnnnnnnnnnnnnnnnnnnnnnnnnnnnnnnnnnnnnnnnnnnnnnnnnnnnnnnnnnnnnnnnnnnnnnnnnnnnnnnnnnnnnnnnnnnnnnnnnnnnnnnnnnnnnnnnnnnnnnnnnnnnnnnnnnnnnnnnnnnnnnnnnnnnnnnnnnnnnnnnnnnnnnnnnnnnnnnnnnnnnnnnnnnnnnnnnnnnnnnnnnnnnnnnnnnnnnnnnnnnnnnnnnnnnnnnnnnnnnnnnnnnnnnnnnnnnnnnnnnnnnnnnnnnnnnnnnnnnnnnnnnnnnnnnnnnnnnnnnnnnnnnnnnnnnnnnnnnnnnnnnnnnnnnnnnnnnnnnnnnnnnnnnnnnnnnnnnnnnnnnnnnnnnnnnnnnnnnnnnnnnnnnnnnnnnnnnnnnnnnnnnnnnnnnnnnnnnnnnnnnnnnnnnnnnnnnnnnnnnnnnnnnnnnnnnnnnnnnnnnnnnnnnnnnnnnnnnnnnnnnnnnnnnnnnnnnnnnnnnnnnnnnnnnnnnnnnnnnnnnnnnnnnnnnnnnnnnnnnnnnnnnnnnnnnnnnnnnnnnnnnnnnnnnnnnnnnnnnnnnnnnnnnnnnnnnnnnnnnnnnnnnnnnnnnnnnnnnnnnnnnnnnnnnnnnnnnnnnnnnnnnnnnnnnnnnnnnnnnnnnnnnnnnnnnnnnnnnnnnnnnnnnnnnnnnnnnnnnnnnnnnnnnnnnnnnnnnnnnnnnnnnnnnnnnnnnnnnnnnnnnnnnnnnnnnnnnnnnnnnnnnnnnnnnnnnnnnnnnnnnnnnnnnnnnnnnnnnnnnnnnnnnnnnnnnnnnnnnnnnnnnnnnnnnnnnnnnnnnnnnnnnnnnnnnnnnnnnnnnnnnnnnnnnnnnnnnnnnnnnnnnnnnnnnnnnnnnnnnnnnnnnnnnnnnnnnnnnnnnnnnnnnnnnnnnnnnnnnnnnnnnnnnnnnnnnnnnnnnnnnnnnnnnnnnnnnnnnnnnnnnnnnnnnnnnnnnnnnnnnnnnnnnnnnnnnnnnnnnnnnnnnnnnnnnnnnnnnnnnnnnnnnnnnnnnnnnnnnnnnnnnnnnnnnnnnnnnnnnnnnnnnnnnnnnnnnnnnnnnnnnnnnnnnnnnnnnnnnnnnnnnnnnnnnnnnnnnnnnnnnnnnnnnnnnnnnnnnnnnnnnnnnnnnnnnnnnnnnnnnnnnnnnnnnnnnnnnnnnnnnnnnnnnnnnnnnnnnnnnnnnnnnnnnnnnnnnnnnnnnnnnnnnnnnnnnnnnnnnnnnnnnnnnnnnnnnnnnnnnnnnnnnnnnnnnnnnnnnnnnnnnnnnnnnnnnnnnnnnnnnnnnnnnnnnnnnnnnnnnnnnnnnnnnnnnnnnnnnnnnnnnnnnnnnnnnnnnnnnnnnnnnnnnnnnnnnnnnnnnnnnnnnnnnnnnnnnnnnnnnnnnnnnnnnnnnnnnnnnnnnnnnnnnnnnnnnnnnnnnnnnnnnnnnnnnnnnnnnnnnnnnnnnnnnnnnnnnnnnnnnnnnnnnnnnnnnnnnnnnnnnnnnnnnnnnnnnnnnnnnnnnnnnnnnnnnnnnnnnnnnnnnnnnnnnnnnnnnnnnnnnnnnnnnnnnnnnnnnnnnnnnnnnnnnnnnnnnnnnnnnnnnnnnnnnnnnnnnnnnnnnnnnnnnnnnnnnnnnnnnnnnnnnnnnnnnnnnnnnnnnnnnnnnnnnnnnnnnnnnnnnnnnnnnnnnnnnnnnnnnnnnnnnnnnnnnnnnnnnnnnnnnnnnnnnnnnnnnnnnnnnnnnnnnnnnnnnnnnnnnnnnnnnnnnnnnnnnnnnnnnnnnnnnnnnnnnnnnnnnnnnnnnnnnnnnnnnnnnnnnnnnnnnnnnnnnnnnnnnnnnnnnnnnnnnnnnnnnnnnnnnnnnnnnnnnnnnnnnnnnnnnnnnnnnnnnnnnnnnnnnnnnnnnnnnnnnnnnnnnnnnnnnnnnnnnnnnnnnnnnnnnnnnnnnnnnnnnnnnnnnnnnnnnnnnnnnnnnnnnnnnnnnnnnnnnnnnnnnnnnnnnnnnnnnnnnnnnnnnnnnnnnnnnnnnnnnnnnnnnnnnnnnnnnnnnnnnnnnnnnnnnnnnnnnnnnnnnnnnnnnnnnnnnnnnnnnnnnnnnnnnnnnnnnnnnnnnnnnnnnnnnnnnnnnnnnnnnnnnnnnnnnnnnnnnnnnnnnnnnnnnnnnnnnnnnnnnnnnnnnnnnnnnnnnnnnnnnnnnnnnnnnnnnnnnnnnnnnnnnnnnnnnnnnnnnnnnnnnnnnnnnnnnnnnnnnnnnnnnnnnnnnnnnnnnnnnnnnnnnnnnnnnnnnnnnnnnnnnnnnnnnnnnnnnnnnnnnnnnnnnnnnnnnnnnnnnnnnnnnnnnnnnnnnnnnnnnnnnnnnnnnnnnnnnnnnnnnnnnnnnnnnnnnnnnnnnnnnnnnnnnnnnnnnnnnnnnnnnnnnnnnnnnnnnnnnnnnnnnnnnnnnnnnnnnnnnnnnnnnnnnnnnnnnnnnnnnnnnnnnnnnnnnnnnnnnnnnnnnnnnnnnnnnnnnnnnnnnnnnnnnnnnnnnnnnnnnnnnnnnnnnnnnnnnnnnnnnnnnnnnnnnnnnnnnnnnnnnnnnnnnnnnnnnnnnnnnnnnnnnnnnnnnnnnnnnnnnnnnnnnnnnnnnnnnnnnnnnnnnnnnnnnnnnnnnnnnnnnnnnnnnnnnnnnnnnnnnnnnnnnnnnnnnnnnnnnnnnnnnnnnnnnnnnnnnnnnnnnnnnnnnnnnnnnnnnnnnnnnnnnnnnnnnnnnnnnnnnnnnnnnnnnnnnnnnnnnnnnnnnnnnnnnnnnnnnnnnnnnnnnnnnnnnnnnnnnnnnnnnnnnnnnnnnnnnnnnnnnnnnnnnnnnnnnnnnnnnnnnnnnnnnnnnnnnnnnnnnnnnnnnnnnnnnnnnnnnnnnnnnnnnnnnnnnnnnnnnnnnnnnnnnnnnnnnnnnnnnnnnnnnnnnnnnnnnnnnnnnnnnnnnnnnnnnnnnnnnnnnnnnnnnnnnnnnnnnnnnnnnnnnnnnnnnnnnnnnnnnnnnnnnnnnnnnnnnnnnnnnnnnnnnnnnnnnnnnnnnnnnnnnnnnnnnnnnnnnnnnnnnnnnnnnnnnnnnnnnnnnnnnnnnnnnnnnnnnnnnnnnnnnnnnnnnnnnnnnnnnnnnnnnnnnnnnnnnnnnnnnnnnnnnnnnnnnnnnnnnnnnnnnnnnnnnnnnnnnnnnnnnnnnnnnnnnnnnnnnnnnnnnnnnnnnnnnnnnnnnnnnnnnnnnnnnnnnnnnnnnnnnnnnnnnnnnnnnnnnnnnnnnnnnnnnnnnnnnnnnnnnnnnnnnnnnnnnnnnnnnnnnnnnnnnnnnnnnnnnnnnnnnnnnnnnnnnnnnnnnnnnnnnnnnnnnnnnnnnnnnnnnnnnnnnnnnnnnnnnnnnnnnnnnnnnnnnnnnnnnnnnnnnnnnnnnnnnnnnnnnnnnnnnnnnnnnnnnnnnnnnnnnnnnnnnnnnnnnnnnnnnnnnnnnnnnnnnnnnnnnnnnnnnnnnnnnnnnnnnnnnnnnnnnnnnnnnnnnnnnnnnnnnnnnnnnnnnnnnnnnnnnnnnnnnnnnnnnnnnnnnnnnnnnnnnnnnnnnnnnnnnnnnnnnnnnnnnnnnnnnnnnnnnnnnnnnnnnnnnnnnnnnnnnnnnnnnnnnnnnnnnnnnnnnnnnnnnnnnnnnnnnnnnnnnnnnnnnnnnnnnnnnnnnnnnnnnnnnnnnnnnnnnnnnnnnnnnnnnnnnnnnnnnnnnnnnnnnnnnnnnnnnnnnnnnnnnnnnnnnnnnnnnnnnnnnnnnnnnnnnnnnnnnnnnnnnnnnnnnnnnnnnnnnnnnnnnnnnnnnnnnnnnnnnnnnnnnnnnnnnnnnnnnnnnnnnnnnnnnnnnnnnnnnnnnnnnnnnnnnnnnnnnnnnnnnnnnnnnnnnnnnnnnnnnnnnnnnnnnnnnnnnnnnnnnnnnnnnnnnnnnnnnnnnnnnnnnnnnnnnnnnnnnnnnnnnnnnnnnnnnnnnnnnnnnnnnnnnnnnnnnnnnnnnnnnnnnnnnnnnnnnnnnnnnnnnnnnnnnnnnnnnnnnnnnnnnnnnnnnnnnnnnnnnnnnnnnnnnnnnnnnnnnnnnnnnnnnnnnnnnnnnnnnnnnnnnnnnnnnnnnnnnnnnnnnnnnnnnnnnnnnnnnnnnnnnnnnnnnnnnnnnnnnnnnnnnnnnnnnnnnnnnnnnnnnnnnnnnnnnnnnnnnnnnnnnnnnnnnnnnnnnnnnnnnnnnnnnnnnnnnnnnnnnnnnnnnnnnnnnnnnnnnnnnnnnnnnnnnnnnnnnnnnnnnnnnnnnnnnnnnnnnnnnnnnnnnnnnnnnnnnnnnnnnnnnnnnnnnnnnnnnnnnnnnnnnnnnnnnnnnnnnnnnnnnnnnnnnnnnnnnnnnnnnnnnnnnnnnnnnnnnnnnnnnnnnnnnnnnnnnnnnnnnnnnnnnnnnnnnnnnnnnnnnnnnnnnnnnnnnnnnnnnnnnnnnnnnnnnnnnnnnnnnnnnnnnnnnnnnnnnnnnnnnnnnnnnnnnnnnnnnnnnnnnnnnnnnnnnnnnnnnnnnnnnnnnnnnnnnnnnnnnnnnnnnnnnnnnnnnnnnnnnnnnnnnnnnnnnnnnnnnnnnnnnnnnnnnnnnnnnnnnnnnnnnnnnnnnnnnnnnnnnnnnnnnnnnnnnnnnnnnnnnnnnnnnnnnnnnnnnnnnnnnnnnnnnnnnnnnnnnnnnnnnnnnnnnnnnnnnnnnnnnnnnnnnnnnnnnnnnnnnnnnnnnnnnnnnnnnnnnnnnnnnnnnnnnnnnnnnnnnnnnnnnnnnnnnnnnnnnnnnnnnnnnnnnnnnnnnnnnnnnnnnnnnnnnnnnnnnnnnnnnnnnnnnnnnnnnnnnnnnnnnnnnnnnnnnnnnnnnnnnnnnnnnnnnnnnnnnnnnnnnnnnnnnnnnnnnnnnnnnnnnnnnnnnnnnnnnnnnnnnnnnnnnnnnnnnnnnnnnnnnnnnnnnnnnnnnnnnnnnnnnnnnnnnnnnnnnnnnnnnnnnnnnnnnnnnnnnnnnnnnnnnnnnnnnnnnnnnnnnnnnnnnnnnnnnnnnnnnnnnnnnnnnnnnnnnnnnnnnnnnnnnnnnnnnnnnnnnnnnnnnnnnnnnnnnnnnnnnnnnnnnnnnnnnnnnnnnnnnnnnnnnnnnnnnnnnnnnnnnnnnnnnnnnnnnnnnnnnnnnnnnnnnnnnnnnnnnnnnnnnnnnnnnnnnnnnnnnnnnnnnnnnnnnnnnnnnnnnnnnnnnnnnnnnnnnnnnnnnnnnnnnnnnnnnnnnnnnnnnnnnnnnnnnnnnnnnnnnnnnnnnnnnnnnnnnnnnnnnnnnnnnnnnnnnnnnnnnnnnnnnnnnnnnnnnnnnnnnnnnnnnnnnnnnnnnnnnnnnnnnnnnnnnnnnnnnnnnnnnnnnnnnnnnnnnnnnnnnnnnnnnnnnnnnnnnnnnnnnnnnnnnnnnnnnnnnnnnnnnnnnnnnnnnnnnnnnnnnnnnnnnnnnnnnnnnnnnnnnnnnnnnnnnnnnnnnnnnnnnnnnnnnnnnnnnnnnnnnnnnnnnnnnnnnnnnnnnnnnnnnnnnnnnnnnnnnnnnnnnnnnnnnnnnnnnnnnnnnnnnnnnnnnnnnnnnnnnnnnnnnnnnnnnnnnnnnnnnnnnnnnnnnnnnnnnnnnnnnnnnnnnnnnnnnnnnnnnnnnnnnnnnnnnnnnnnnnnnnnnnnnnnnnnnnnnnnnnnnnnnnnnnnnnnnnnnnnnnnnnnnnnnnnnnnnnnnnnnnnnnnnnnnnnnnnnnnnnnnnnnnnnnnnnnnnnnnnnnnnnnnnnnnnnnnnnnnnnnnnnnnnnnnnnnnnnnnnnnnnnnnnnnnnnnnnnnnnnnnnnnnnnnnnnnnnnnnnnnnnnnnnnnnnnnnnnnnnnnnnnnnnnnnnnnnnnnnnnnnnnnnnnnnnnnnnnnnnnnnnnnnnnnnnnnnnnnnnnnnnnnnnnnnnnnnnnnnnnnnnnnnnnnnnnnnnnnnnnnnnnnnnnnnnnnnnnnnnnnnnnnnnnnnnnnnnnnnnnnnnnnnnnnnnnnnnnnnnnnnnnnnnnnnnnnnnnnnnnnnnnnnnnnnnnnnnnnnnnnnnnnnnnnnnnnnnnnnnnnnnnnnnnnnnnnnnnnnnnnnnnnnnnnnnnnnnnnnnnnnnnnnnnnnnnnnnnnnnnnnnnnnnnnnnnnnnnnnnnnnnnnnnnnnnnnnnnnnnnnnnnnnnnnnnnnnnnnnnnnnnnnnnnnnnnnnnnnnnnnnnnnnnnnnnnnnnnnnnnnnnnnnnnnnnnnnnnnnnnnnnnnnnnnnnnnnnnnnnnnnnnnnnnnnnnnnnnnnnnnnnnnnnnnnnnnnnnnnnnnnnnnnnnnnnnnnnnnnnnnnnnnnnnnnnnnnnnnnnnnnnnnnnnnnnnnnnnnnnnnnnnnnnnnnnnnnnnnnnnnnnnnnnnnnnnnnnnnnnnnnnnnnnnnnnnnnnnnnnnnnnnnnnnnnnnnnnnnnnnnnnnnnnnnnnnnnnnnnnnnnnnnnnnnnnnnnnnnnnnnnnnnnnnnnnnnnnnnnnnnnnnnnnnnnnnnnnnnnnnnnnnnnnnnnnnnnnnnnnnnnnnnnnnnnnnnnnnnnnnnnnnnnnnnnnnnnnnnnnnnnnnnnnnnnnnnnnnnnnnnnnnnnnnnnnnnnnnnnnnnnnnnnnnnnnnnnnnnnnnnnnnnnnnnnnnnnnnnnnnnnnnnnnnnnnnnnnnnnnnnnnnnnnnnnnnnnnnnnnnnnnnnnnnnnnnnnnnnnnnnnnnnnnnnnnnnnnnnnnnnnnnnnnnnnnnnnnnnnnnnnnnnnnnnnnnnnnnnnnnnnnnnnnnnnnnnnnnnnnnnnnnnnnnnnnnnnnnnnnnnnnnnnnnnnnnnnnnnnnnnnnnnnnnnnnnnnnnnnnnnnnnnnnnnnnnnnnnnnnnnnnnnnnnnnnnnnnnnnnnnnnnnnnnnnnnnnnnnnnnnnnnnnnnnnnnnnnnnnnnnnnnnnnnnnnnnnnnnnnnnnnnnnnnnnnnnnnnnnnnnnnnnnnnnnnnnnnnnnnnnnnnnnnnnnnnnnnnnnnnnnnnnnnnnnnnnnnnnnnnnnnnnnnnnnnnnnnnnnnnnnnnnnnnnnnnnnnnnnnnnnnnnnnnnnnnnnnnnnnnnnnnnnnnnnnnnnnnnnnnnnnnnnnnnnnnnnnnnnnnnnnnnnnnnnnnnnnnnnnnnnnnnnnnnnnnnnnnnnnnnnnnnnnnnnnnnnnnnnnnnnnnnnnnnnnnnnnnnnnnnnnnnnnnnnnnnnnnnnnnnnnnnnnnnnnnnnnnnnnnnnnnnnnnnnnnnnnnnnnnnnnnnnnnnnnnnnnnnnnnnnnnnnnnnnnnnnnnnnnnnnnnnnnnnnnnnnnnnnnnnnnnnnnnnnnnnnnnnnnnnnnnnnnnnnnnnnnnnnnnnnnnnnnnnnnnnnnnnnnnnnnnnnnnnnnnnnnnnnnnnnnnnnnnnnnnnnnnnnnnnnnnnnnnnnnnnnnnnnnnnnnnnnnnnnnnnnnnnnnnnnnnnnnnnnnnnnnnnnnnnnnnnnnnnnnnnnnnnnnnnnnnnnnnnnnnnnnnnnnnnnnnnnnnnnnnnnnnnnnnnnnnnnnnnnnnnnnnnnnnnnnnnnnnnnnnnnnnnnnnnnnnnnnnnnnnnnnnnnnnnnnnnnnnnnnnnnnnnnnnnnnnnnnnnnnnnnnnnnnnnnnnnnnnnnnnnnnnnnnnnnnnnnnnnnnnnnnnnnnnnnnnnnnnnnnnnnnnnnnnnnnnnnnnnnnnnnnnnnnnnnnnnnnnnnnnnnnnnnnnnnnnnnnnnnnnnnnnnnnnnnnnnnnnnnnnnnnnnnnnnnnnnnnnnnnnnnnnnnnnnnnnnnnnnnnnnnnnnnnnnnnnnnnnnnnnnnnnnnnnnnnnnnnnnnnnnnnnnnnnnnnnnnnnnnnnnnnnnnnnnnnnnnnnnnnnnnnnnnnnnnnnnnnnnnnnnnnnnnnnnnnnnnnnnnnnnnnnnnnnnnnnnnnnnnnnnnnnnnnnnnnnnnnnnnnnnnnnnnnnnnnnnnnnnnnnnnnnnnnnnnnnnnnnnnnnnnnnnnnnnnnnnnnnnnnnnnnnnnnnnnnnnnnnnnnnnnnnnnnnnnnnnnnnnnnnnnnnnnnnnnnnnnnnnnnnnnnnnnnnnnnnnnnnnnnnnnnnnnnnnnnnnnnnnnnnnnnnnnnnnnnnnnnnnnnnnnnnnnnnnnnnnnnnnnnnnnnnnnnnnnnnnnnnnnnnnnnnnnnnnnnnnnnnnnnnnnnnnnnnnnnnnnnnnnnnnnnnnnnnnnnnnnnnnnnnnnnnnnnnnnnnnnnnnnnnnnnnnnnnnnnnnnnnnnnnnnnnnnnnnnnnnnnnnnnnnnnnnnnnnnnnnnnnnnnnnnnnnnnnnnnnnnnnnnnnnnnnnnnnnnnnnnnnnnnnnnnnnnnnnnnnnnnnnnnnnnnnnnnnnnnnnnnnnnnnnnnnnnnnnnnnnnnnnnnnnnnnnnnnnnnnnnnnnnnnnnnnnnnnnnnnnnnnnnnnnnnnnnnnnnnnnnnnnnnnnnnnnnnnnnnnnnnnnnnnnnnnnnnnnnnnnnnnnnnnnnnnnnnnnnnnnnnnnnnnnnnnnnnnnnnnnnnnnnnnnnnnnnnnnnnnnnnnnnnnnnnnnnnnnnnnnnnnnnnnnnnnnnnnnnnnnnnnnnnnnnnnnnnnnnnnnnnnnnnnnnnnnnnnnnnnnnnnnnnnnnnnnnnnnnnnnnnnnnnnnnnnnnnnnnnnnnnnnnnnnnnnnnnnnnnnnnnnnnnnnnnnnnnnnnnnnnnnnnnnnnnnnnnnnnnnnnnnnnnnnnnnnnnnnnnnnnnnnnnnnnnnnnnnnnnnnnnnnnnnnnnnnnnnnnnnnnnnnnnnnnnnnnnnnnnnnnnnnnnnnnnnnnnnnnnnnnnnnnnnnnnnnnnnnnnnnnnnnnnnnnnnnnnnnnnnnnnnnnnnnnnnnnnnnnnnnnnnnnnnnnnnnnnnnnnnnnnnnnnnnnnnnnnnnnnnnnnnnnnnnnnnnnnnnnnnnnnnnnnnnnnnnnnnnnnnnnnnnnnnnnnnnnnnnnnnnnnnnnnnnnnnnnnnnnnnnnnnnnnnnnnnnnnnnnnnnnnnnnnnnnnnnnnnnnnnnnnnnnnnnnnnnnnnnnnnnnnnnnnnnnnnnnnnnnnnnnnnnnnnnnnnnnnnnnnnnnnnnnnnnnnnnnnnnnnnnnnnnnnnnnnnnnnnnnnnnnnnnnnnnnnnnnnnnnnnnnnnnnnnnnnnnnnnnnnnnnnnnnnnnnnnnnnnnnnnnnnnnnnnnnnnnnnnnnnnnnnnnnnnnnnnnnnnnnnnnnnnnnnnnnnnnnnnnnnnnnnnnnnnnnnnnnnnnnnnnnnnnnnnnnnnnnnnnnnnnnnnnnnnnnnnnnnnnnnnnnnnnnnnnnnnnnnnnnnnnnnnnnnnnnnnnnnnnnnnnnnnnnnnnnnnnnnnnnnnnnnnnnnnnnnnnnnnnnnnnnnnnnnnnnnnnnnnnnnnnnnnnnnnnnnnnnnnnnnnnnnnnnnnnnnnnnnnnnnnnnnnnnnnnnnnnnnnnnnnnnnnnnnnnnnnnnnnnnnnnnnnnnnnnnnnnnnnnnnnnnnnnnnnnnnnnnnnnnnnnnnnnnnnnnnnnnnnnnnnnnnnnnnnnnnnnnnnnnnnnnnnnnnnnnnnnnnnnnnnnnnnnnnnnnnnnnnnnnnnnnnnnnnnnnnnnnnnnnnnnnnnnnnnnnnnnnnnnnnnnnnnnnnnnnnnnnnnnnnnnnnnnnnnnnnnnnnnnnnnnnnnnnnnnnnnnnnnnnnnnnnnnnnnnnnnnnnnnnnnnnnnnnnnnnnnnnnnnnnnnnnnnnnnnnnnnnnnnnnnnnnnnnnnnnnnnnnnnnnnnnnnnnnnnnnnnnnnnnnnnnnnnnnnnnnnnnnnnnnnnnnnnnnnnnnnnnnnnnnnnnnnnnnnnnnnnnnnnnnnnnnnnnnnnnnnnnnnnnnnnnnnnnnnnnnnnnnnnnnnnnnnnnnnnnnnnnnnnnnnnnnnnnnnnnnnnnnnnnnnnnnnnnnnnnnnnnnnnnnnnnnnnnnnnnnnnnnnnnnnnnnnnnnnnnnnnnnnnnnnnnnnnnnnnnnnnnnnnnnnnnnnnnnnnnnnnnnnnnnnnnnnnnnnnnnnnnnnnnnnnnnnnnnnnnnnnnnnnnnnnnnnnnnnnnnnnnnnnnnnnnnnnnnnnnnnnnnnnnnnnnnnnnnnnnnnnnnnnnnnnnnnnnnnnnnnnnnnnnnnnnnnnnnnnnnnnnnnnnnnnnnnnnnnnnnnnnnnnnnnnnnnnnnnnnnnnnnnnnnnnnnnnnnnnnnnnnnnnnnnnnnnnnnnnnnnnnnnnnnnnnnnnnnnnnnnnnnnnnnnnnnnnnnnnnnnnnnnnnnnnnnnnnnnnnnnnnnnnnnnnnnnnnnnnnnnnnnnnnnnnnnnnnnnnnnnnnnnnnnnnnnnnnnnnnnnnnnnnnnnnnnnnnnnnnnnnnnnnnnnnnnnnnnnnnnnnnnnnnnnnnnnnnnnnnnnnnnnnnnnnnnnnnnnnnnnnnnnnnnnnnnnnnnnnnnnnnnnnnnnnnnnnnnnnnnnnnnnnnnnnnnnnnnnnnnnnnnnnnnnnnnnnnnnnnnnnnnnnnnnnnnnnnnnnnnnnnnnnnnnnnnnnnnnnnnnnnnnnnnnnnnnnnnnnnnnnnnnnnnnnnnnnnnnnnnnnnnnnnnnnnnnnnnnnnnnnnnnnnnnnnnnnnnnnnnnnnnnnnnnnnnnnnnnnnnnnnnnnnnnnnnnnnnnnnnnnnnnnnnnnnnnnnnnnnnnnnnnnnnnnnnnnnnnnnnnnnnnnnnnnnnnnnnnnnnnnnnnnnnnnnnnnnnnnnnnnnnnnnnnnnnnnnnnnnnnnnnnnnnnnnnnnnnnnnnnnnnnnnnnnnnnnnnnnnnnnnnnnnnnnnnnnnnnnnnnnnnnnnnnnnnnnnnnnnnnnnnnnnnnnnnnnnnnnnnnnnnnnnnnnnnnnnnnnnnnnnnnnnnnnnnnnnnnnnnnnnnnnnnnnnnnnnnnnnnnnnnnnnnnnnnnnnnnnnnnnnnnnnnnnnnnnnnnnnnnnnnnnnnnnnnnnnnnnnnnnnnnnnnnnnnnnnnnnnnnnnnnnnnnnnnnnnnnnnnnnnnnnnnnnnnnnnnnnnnnnnnnnnnnnnnnnnnnnnnnnnnnnnnnnnnnnnnnnnnnnnnnnnnnnnnnnnnnnnnnnnnnnnnnnnnnnnnnnnnnnnnnnnnnnnnnnnnnnnnnnnnnnnnnnnnnnnnnnnnnnnnnnnnnnnnnnnnnnnnnnnnnnnnnnnnnnnnnnnnnnnnnnnnnnnnnnnnnnnnnnnnnnnnnnnnnnnnnnnnnnnnnnnnnnnnnnnnnnnnnnnnnnnnnnnnnnnnnnnnnnnnnnnnnnnnnnnnnnnnnnnnnnnnnnnnnnnnnnnnnnnnnnnnnnnnnnnnnnnnnnnnnnnnnnnnnnnnnnnnnnnnnnnnnnnnnnnnnnnnnnnnnnnnnnnnnnnnnnnnnnnnnnnnnnnnnnnnnnnnnnnnnnnnnnnnnnnnnnnnnnnnnnnnnnnnnnnnnnnnnnnnnnnnnnnnnnnnnnnnnnnnnnnnnnnnnnnnnnnnnnnnnnnnnnnnnnnnnnnnnnnnnnnnnnnnnnnnnnnnnnnnnnnnnnnnnnnnnnnnnnnnnnnnnnnnnnnnnnnnnnnnnnnnnnnnnnnnnnnnnnnnnnnnnnnnnnnnnnnnnnnnnnnnnnnnnnnnnnnnnnnnnnnnnnnnnnnnnnnnnnnnnnnnnnnnnnnnnnnnnnnnnnnnnnnnnnnnnnnnnnnnnnnnnnnnnnnnnnnnnnnnnnnnnnnnnnnnnnnnnnnnnnnnnnnnnnnnnnnnnnnnnnnnnnnnnnnnnnnnnnnnnnnnnnnnnnnnnnnnnnnnnnnnnnnnnnnnnnnnnnnnnnnnnnnnnnnnnnnnnnnnnnnnnnnnnnnnnnnnnnnnnnnnnnnnnnnnnnnnnnnnnnnnnnnnnnnnnnnnnnnnnnnnnnnnnnnnnnnnnnnnnnnnnnnnnnnnnnnnnnnnnnnnnnnnnnnnnnnnnnnnnnnnnnnnnnnnnnnnnnnnnnnnnnnnnnnnnnnnnnnnnnnnnnnnnnnnnnnnnnnnnnnnnnnnnnnnnnnnnnnnnnnnnnnnnnnnnnnnnnnnnnnnnnnnnnnnnnnnnnnnnnnnnnnnnnnnnnnnnnnnnnnnnnnnnnnnnnnnnnnnnnnnnnnnnnnnnnnnnnnnnnnnnnnnnnnnnnnnnnnnnnnnnnnnnnnnnnnnnnnnnnnnnnnnnnnnnnnnnnnnnnnnnnnnnnnnnnnnnnnnnnnnnnnnnnnnnnnnnnnnnnnnnnnnnnnnnnnnnnnnnnnnnnnnnnnnnnnnnnnnnnnnnnnnnnnnnnnnnnnnnnnnnnnnnnnnnnnnnnnnnnnnnnnnnnnnnnnnnnnnnnnnnnnnnnnnnnnnnnnnnnnnnnnnnnnnnnnnnnnnnnnnnnnnnnnnnnnnnnnnnnnnnnnnnnnnnnnnnnnnnnnnnnnnnnnnnnnnnnnnnnnnnnnnnnnnnnnnnnnnnnnnnnnnnnnnnnnnnnnnnnnnnnnnnnnnnnnnnnnnnnnnnnnnnnnnnnnnnnnnnnnnnnnnnnnnnnnnnnnnnnnnnnnnnnnnnnnnnnnnnnnnnnnnnnnnnnnnnnnnnnnnnnnnnnnnnnnnnnnnnnnnnnnnnnnnnnnnnnnnnnnnnnnnnnnnnnnnnnnnnnnnnnnnnnnnnnnnnnnnnnnnnnnnnnnnnnnnnnnnnnnnnnnnnnnnnnnnnnnnnnnnnnnnnnnnnnnnnnnnnnnnnnnnnnnnnnnnnnnnnnnnnnnnnnnnnnnnnnnnnnnnnnnnnnnnnnnnnnnnnnnnnnnnnnnnnnnnnnnnnnnnnnnnnnnnnnnnnnnnnnnnnnnnnnnnnnnnnnnnnnnnnnnnnnnnnnnnnnnnnnnnnnnnnnnnnnnnnnnnnnnnnnnnnnnnnnnnnnnnnnnnnnnnnnnnnnnnnnnnnnnnnnnnnnnnnnnnnnnnnnnnnnnnnnnnnnnnnnnnnnnnnnnnnnnnnnnnnnnnnnnnnnnnnnnnnnnnnnnnnnnnnnnnnnnnnnnnnnnnnnnnnnnnnnnnnnnnnnnnnnnnnnnnnnnnnnnnnnnnnnnnnnnnnnnnnnnnnnnnnnnnnnnnnnnnnnnnnnnnnnnnnnnnnnnnnnnnnnnnnnnnnnnnnnnnnnnnnnnnnnnnnnnnnnnnnnnnnnnnnnnnnnnnnnnnnnnnnnnnnnnnnnnnnnnnnnnnnnnnnnnnnnnnnnnnnnnnnnnnnnnnnnnnnnnnnnnnnnnnnnnnnnnnnnnnnnnnnnnnnnnnnnnnnnnnnnnnnnnnnnnnnnnnnnnnnnnnnnnnnnnnnnnnnnnnnnnnnnnnnnnnnnnnnnnnnnnnnnnnnnnnnnnnnnnnnnnnnnnnnnnnnnnnnnnnnnnnnnnnnnnnnnnnnnnnnnnnnnnnnnnnnnnnnnnnnnnnnnnnnnnnnnnnnnnnnnnnnnnnnnnnnnnnnnnnnnnnnnnnnnnnnnnnnnnnnnnnnnnnnnnnnnnnnnnnnnnnnnnnnnnnnnnnnnnnnnnnnnnnnnnnnnnnnnnnnnnnnnnnnnnnnnnnnnnnnnnnnnnnnnnnnnnnnnnnnnnnnnnnnnnnnnnnnnnnnnnnnnnnnnnnnnnnnnnnnnnnnnnnnnnnnnnnnnnnnnnnnnnnnnnnnnnnnnnnnnnnnnnnnnnnnnnnnnnnnnnnnnnnnnnnnnnnnnnnnnnnnnnnnnnnnnnnnnnnnnnnnnnnnnnnnnnnnnnnnnnnnnnnnnnnnnnnnnnnnnnnnnnnnnnnnnnnnnnnnnnnnnnnnnnnnnnnnnnnnnnnnnnnnnnnnnnnnnnnnnnnnnnnnnnnnnnnnnnnnnnnnnnnnnnnnnnnnnnnnnnnnnnnnnnnnnnnnnnnnnnnnnnnnnnnnnnnnnnnnnnnnnnnnnnnnnnnnnnnnnnnnnnnnnnnnnnnnnnnnnnnnnnnnnnnnnnnnnnnnnnnnnnnnnnnnnnnnnnnnnnnnnnnnnnnnnnnnnnnnnnnnnnnnnnnnnnnnnnnnnnnnnnnnnnnnnnnnnnnnnnnnnnnnnnnnnnnnnnnnnnnnnnnnnnnnnnnnnnnnnnnnnnnnnnnnnnnnnnnnnnnnnnnnnnnnnnnnnnnnnnnnnnnnnnnnnnnnnnnnnnnnnnnnnnnnnnnnnnnnnnnnnnnnnnnnnnnnnnnnnnnnnnnnnnnnnnnnnnnnnnnnnnnnnnnnnnnnnnnnnnnnnnnnnnnnnnnnnnnnnnnnnnnnnnnnnnnnnnnnnnnnnnnnnnnnnnnnnnnnnnnnnnnnnnnnnnnnnnnnnnnnnnnnnnnnnnnnnnnnnnnnnnnnnnnnnnnnnnnnnnnnnnnnnnnnnnnnnnnnnnnnnnnnnnnnnnnnnnnnnnnnnnnnnnnnnnnnnnnnnnnnnnnnnnnnnnnnnnnnnnnnnnnnnnnnnnnnnnnnnnnnnnnnnnnnnnnnnnnnnnnnnnnnnnnnnnnnnnnnnnnnnnnnnnnnnnnnnnnnnnnnnnnnnnnnnnnnnnnnnnnnnnnnnnnnnnnnnnnnnnnnnnnnnnnnnnnnnnnnnnnnnnnnnnnnnnnnnnnnnnnnnnnnnnnnnnnnnnnnnnnnnnnnnnnnnnnnnnnnnnnnnnnnnnnnnnnnnnnnnnnnnnnnnnnnnnnnnnnnnnnnnnnnnnnnnnnnnnnnnnnnnnnnnnnnnnnnnnnnnnnnnnnnnnnnnnnnnnnnnnnnnnnnnnnnnnnnnnnnnnnnnnnnnnnnnnnnnnnnnnnnnnnnnnnnnnnnnnnnnnnnnnnnnnnnnnnnnnnnnnnnnnnnnnnnnnnnnnnnnnnnnnnnnnnnnnnnnnnnnnnnnnnnnnnnnnnnnnnnnnnnnnnnnnnnnnnnnnnnnnnnnnnnnnnnnnnnnnnnnnnnnnnnnnnnnnnnnnnnnnnnnnnnnnnnnnnnnnnnnnnnnnnnnnnnnnnnnnnnnnnnnnnnnnnnnnnnnnnnnnnnnnnnnnnnnnnnnnnnnnnnnnnnnnnnnnnnnnnnnnnnnnnnnnnnnnnnnnnnnnnnnnnnnnnnnnnnnnnnnnnnnnnnnnnnnnnnnnnnnnnnnnnnnnnnnnnnnnnnnnnnnnnnnnnnnnnnnnnnnnnnnnnnnnnnnnnnnnnnnnnnnnnnnnnnnnnnnnnnnnnnnnnnnnnnnnnnnnnnnnnnnnnnnnnnnnnnnnnnnnnnnnnnnnnnnnnnnnnnnnnnnnnnnnnnnnnnnnnnnnnnnnnnnnnnnnnnnnnnnnnnnnnnnnnnnnnnnnnnnnnnnnnnnnnnnnnnnnnnnnnnnnnnnnnnnnnnnnnnnnnnnnnnnnnnnnnnnnnnnnnnnnnnnnnnnnnnnnnnnnnnnnnnnnnnnnnnnnnnnnnnnnnnnnnnnnnnnnnnnnnnnnnnnnnnnnnnnnnnnnnnnnnnnnnnnnnnnnnnnnnnnnnnnnnnnnnnnnnnnnnnnnnnnnnnnnnnnnnnnnnnnnnnnnnnnnnnnnnnnnnnnnnnnnnnnnnnnnnnnnnnnnnnnnnnnnnnnnnnnnnnnnnnnnnnnnnnnnnnnnnnnnnnnnnnnnnnnnnnnnnnnnnnnnnnnnnnnnnnnnnnnnnnnnnnnnnnnnnnnnnnnnnnnnnnnnnnnnnnnnnnnnnnnnnnnnnnnnnnnnnnnnnnnnnnnnnnnnnnnnnnnnnnnnnnnnnnnnnnnnnnnnnnnnnnnnnnnnnnnnnnnnnnnnnnnnnnnnnnnnnnnnnnnnnnnnnnnnnnnnnnnnnnnnnnnnnnnnnnnnnnnnnnnnnnnnnnnnnnnnnnnnnnnnnnnnnnnnnnnnnnnnnnnnnnnnnnnnnnnnnnnnnnnnnnnnnnnnnnnnnnnnnnnnnnnnnnnnnnnnnnnnnnnnnnnnnnnnnnnnnnnnnnnnnnnnnnnnnnnnnnnnnnnnnnnnnnnnnnnnnnnnnnnnnnnnnnnnnnnnnnnnnnnnnnnnnnnnnnnnnnnnnnnnnnnnnnnnnnnnnnnnnnnnnnnnnnnnnnnnnnnnnnnnnnnnnnnnnnnnnnnnnnnnnnnnnnnnnnnnnnnnnnnnnnnnnnnnnnnnnnnnnnnnnnnnnnnnnnnnnnnnnnnnnnnnnnnnnnnnnnnnnnnnnnnnnnnnnnnnnnnnnnnnnnnnnnnnnnnnnnnnnnnnnnnnnnnnnnnnnnnnnnnnnnnnnnnnnnnnnnnnnnnnnnnnnnnnnnnnnnnnnnnnnnnnnnnnnnnnnnnnnnnnnnnnnnnnnnnnnnnnnnnnnnnnnnnnnnnnnnnnnnnnnnnnnnnnnnnnnnnnnnnnnnnnnnnnnnnnnnnnnnnnnnnnnnnnnnnnnnnnnnnnnnnnnnnnnnnnnnnnnnnnnnnnnnnnnnnnnnnnnnnnnnnnnnnnnnnnnnnnnnnnnnnnnnnnnnnnnnnnnnnnnnnnnnnnnnnnnnnnnnnnnnnnnnnnnnnnnnnnnnnnnnnnnnnnnnnnnnnnnnnnnnnnnnnnnnnnnnnnnnnnnnnnnnnnnnnnnnnnnnnnnnnnnnnnnnnnnnnnnnnnnnnnnnnnnnnnnnnnnnnnnnnnnnnnnnnnnnnnnnnnnnnnnnnnnnnnnnnnnnnnnnnnnnnnnnnnnnnnnnnnnnnnnnnnnnnnnnnnnnnnnnnnnnnnnnnnnnnnnnnnnnnnnnnnnnnnnnnnnnnnnnnnnnnnnnnnnnnnnnnnnnnnnnnnnnnnnnnnnnnnnnnnnnnnnnnnnnnnnnnnnnnnnnnnnnnnnnnnnnnnnnnnnnnnnnnnnnnnnnnnnnnnnnnnnnnnnnnnnnnnnnnnnnnnnnnnnnnnnnnnnnnnnnnnnnnnnnnnnnnnnnnnnnnnnnnnnnnnnnnnnnnnnnnnnnnnnnnnnnnnnnnnnnnnnnnnnnnnnnnnnnnnnnnnnnnnnnnnnnnnnnnnnnnnnnnnnnnnnnnnnnnnnnnnnnnnnnnnnnnnnnnnnnnnnnnnnnnnnnnnnnnnnnnnnnnnnnnnnnnnnnnnnnnnnnnnnnnnnnnnnnnnnnnnnnnnnnnnnnnnnnnnnnnnnnnnnnnnnnnnnnnnnnnnnnnnnnnnnnnnnnnnnnnnnnnnnnnnnnnnnnnnnnnnnnnnnnnnnnnnnnnnnnnnnnnnnnnnnnnnnnnnnnnnnnnnnnnnnnnnnnnnnnnnnnnnnnnnnnnnnnnnnnnnnnnnnnnnnnnnnnnnnnnnnnnnnnnnnnnnnnnnnnnnnnnnnnnnnnnnnnnnnnnnnnnnnnnnnnnnnnnnnnnnnnnnnnnnnnnnnnnnnnnnnnnnnnnnnnnnnnnnnnnnnnnnnnnnnnnnnnnnnnnnnnnnnnnnnnnnnnnnnnnnnnnnnnnnnnnnnnnnnnnnnnnnnnnnnnnnnnnnnnnnnnnnnnnnnnnnnnnnnnnnnnnnnnnnnnnnnnnnnnnnnnnnnnnnnnnnnnnnnnnnnnnnnnnnnnnnnnnnnnnnnnnnnnnnnnnnnnnnnnnnnnnnnnnnnnnnnnnnnnnnnnnnnnnnnnnnnnnnnnnnnnnnnnnnnnnnnnnnnnnnnnnnnnnnnnnnnnnnnnnnnnnnnnnnnnnnnnnnnnnnnnnnnnnnnnnnnnnnnnnnnnnnnnnnnnnnnnnnnnnnnnnnnnnnnnnnnnnnnnnnnnnnnnnnnnnnnnnnnnnnnnnnnnnnnnnnnnnnnnnnnnnnnnnnnnnnnnnnnnnnnnnnnnnnnnnnnnnnnnnnnnnnnnnnnnnnnnnnnnnnnnnnnnnnnnnnnnnnnnnnnnnnnnnnnnnnnnnnnnnnnnnnnnnnnnnnnnnnnnnnnnnnnnnnnnnnnnnnnnnnnnnnnnnnnnnnnnnnnnnnnnnnnnnnnnnnnnnnnnnnnnnnnnnnnnnnnnnnnnnnnnnnnnnnnnnnnnnnnnnnnnnnnnnnnnnnnnnnnnnnnnnnnnnnnnnnnnnnnnnnnnnnnnnnnnnnnnnnnnnnnnnnnnnnnnnnnnnnnnnnnnnnnnnnnnnnnnnnnnnnnnnnnnnnnnnnnnnnnnnnnnnnnnnnnnnnnnnnnnnnnnnnnnnnnnnnnnnnnnnnnnnnnnnnnnnnnnnnnnnnnnnnnnnnnnnnnnnnnnnnnnnnnnnnnnnnnnnnnnnnnnnnnnnnnnnnnnnnnnnnnnnnnnnnnnnnnnnnnnnnnnnnnnnnnnnnnnnnnnnnnnnnnnnnnnnnnnnnnnnnnnnnnnnnnnnnnnnnnnnnnnnnnnnnnnnnnnnnnnnnnnnnnnnnnnnnnnnnnnnnnnnnnnnnnnnnnnnnnnnnnnnnnnnnnnnnnnnnnnnnnnnnnnnnnnnnnnnnnnnnnnnnnnnnnnnnnnnnnnnnnnnnnnnnnnnnnnnnnnnnnnnnnnnnnnnnnnnnnnnnnnnnnnnnnnnnnnnnnnnnnnnnnnnnnnnnnnnnnnnnnnnnnnnnnnnnnnnnnnnnnnnnnnnnnnnnnnnnnnnnnnnnnnnnnnnnnnnnnnnnnnnnnnnnnnnnnnnnnnnnnnnnnnnnnnnnnnnnnnnnnnnnnnnnnnnnnnnnnnnnnnnnnnnnnnnnnnnnnnnnnnnnnnnnnnnnnnnnnnnnnnnnnnnnnnnnnnnnnnnnnnnnnnnnnnnnnnnnnnnnnnnnnnnnnnnnnnnnnnnnnnnnnnnnnnnnnnnnnnnnnnnnnnnnnnnnnnnnnnnnnnnnnnnnnnnnnnnnnnnnnnnnnnnnnnnnnnnnnnnnnnnnnnnnnnnnnnnnnnnnnnnnnnnnnnnnnnnnnnnnnnnnnnnnnnnnnnnnnnnnnnnnnnnnnnnnnnnnnnnnnnnnnnnnnnnnnnnnnnnnnnnnnnnnnnnnnnnnnnnnnnnnnnnnnnnnnnnnnnnnnnnnnnnnnnnnnnnnnnnnnnnnnnnnnnnnnnnnnnnnnnnnnnnnnnnnnnnnnnnnnnnnnnnnnnnnnnnnnnnnnnnnnnnnnnnnnnnnnnnnnnnnnnnnnnnnnnnnnnnnnnnnnnnnnnnnnnnnnnnnnnnnnnnnnnnnnnnnnnnnnnnnnnnnnnnnnnnnnnnnnnnnnnnnnnnnnnnnnnnnnnnnnnnnnnnnnnnnnnnnnnnnnnnnnnnnnnnnnnnnnnnnnnnnnnnnnnnnnnnnnnnnnnnnnnnnnnnnnnnnnnnnnnnnnnnnnnnnnnnnnnnnnnnnnnnnnnnnnnnnnnnnnnnnnnnnnnnnnnnnnnnnnnnnnnnnnnnnnnnnnnnnnnnnnnnnnnnnnnnnnnnnnnnnnnnnnnnnnnnnnnnnnnnnnnnnnnnnnnnnnnnnnnnnnnnnnnnnnnnnnnnnnnnnnnnnnnnnnnnnnnnnnnnnnnnnnnnnnnnnnnnnnnnnnnnnnnnnnnnnnnnnnnnnnnnnnnnnnnnnnnnnnnnnnnnnnnnnnnnnnnnnnnnnnnnnnnnnnnnnnnnnnnnnnnnnnnnnnnnnnnnnnnnnnnnnnnnnnnnnnnnnnnnnnnnnnnnnnnnnnnnnnnnnnnnnnnnnnnnnnnnnnnnnnnnnnnnnnnnnnnnnnnnnnnnnnnnnnnnnnnnnnnnnnnnnnnnnnnnnnnnnnnnnnnnnnnnnnnnnnnnnnnnnnnnnnnnnnnnnnnnnnnnnnnnnnnnnnnnnnnnnnnnnnnnnnnnnnnnnnnnnnnnnnnnnnnnnnnnnnnnnnnnnnnnnnnnnnnnnnnnnnnnnnnnnnnnnnnnnnnnnnnnnnnnnnnnnnnnnnnnnnnnnnnnnnnnnnnnnnnnnnnnnnnnnnnnnnnnnnnnnnnnnnnnnnnnnnnnnnnnnnnnnnnnnnnnnnnnnnnnnnnnnnnnnnnnnnnnnnnnnnnnnnnnnnnnnnnnnnnnnnnnnnnnnnnnnnnnnnnnnnnnnnnnnnnnnnnnnnnnnnnnnnnnnnnnnnnnnnnnnnnnnnnnnnnnnnnnnnnnnnnnnnnnnnnnnnnnnnnnnnnnnnnnnnnnnnnnnnnnnnnnnnnnnnnnnnnnnnnnnnnnnnnnnnnnnnnnnnnnnnnnnnnnnnnnnnnnnnnnnnnnnnnnnnnnnnnnnnnnnnnnnnnnnnnnnnnnnnnnnnnnnnnnnnnnnnnnnnnnnnnnnnnnnnnnnnnnnnnnnnnnnnnnnnnnnnnnnnnnnnnnnnnnnnnnnnnnnnnnnnnnnnnnnnnnnnnnnnnnnnnnnnnnnnnnnnnnnnnnnnnnnnnnnnnnnnnnnnnnnnnnnnnnnnnnnnnnnnnnnnnnnnnnnnnnnnnnnnnnnnnnnnnnnnnnnnnnnnnnnnnnnnnnnnnnnnnnnnnnnnnnnnnnnnnnnnnnnnnnnnnnnnnnnnnnnnnnnnnnnnnnnnnnnnnnnnnnnnnnnnnnnnnnnnnnnnnnnnnnnnnnnnnnnnnnnnnnnnnnnnnnnnnnnnnnnnnnnnnnnnnnnnnnnnnnnnnnnnnnnnnnnnnnnnnnnnnnnnnnnnnnnnnnnnnnnnnnnnnnnnnnnnnnnnnnnnnnnnnnnnnnnnnnnnnnnnnnnnnnnnnnnnnnnnnnnnnnnnnnnnnnnnnnnnnnnnnnnnnnnnnnnnnnnnnnnnnnnnnnnnnnnnnnnnnnnnnnnnnnnnnnnnnnnnnnnnnnnnnnnnnnnnnnnnnnnnnnnnnnnnnnnnnnnnnnnnnnnnnnnnnnnnnnnnnnnnnnnnnnnnnnnnnnnnnnnnnnnnnnnnnnnnnnnnnnnnnnnnnnnnnnnnnnnnnnnnnnnnnnnnnnnnnnnnnnnnnnnnnnnnnnnnnnnnnnnnnnnnnnnnnnnnnnnnnnnnnnnnnnnnnnngctcttcnngaagagcttc

SEQ ID NO: 21 - DNA, 39 bp, Artificial Sequence
  source: /note="Description of Artificial Sequence: Synthetic oligonucleotide"
  modified_base (11)..(15): a, c, t, or g
  modified_base (28)..(29): a, c, t, or g
gaagctcttcnnnnngaagagctcttcnngaagagcttc

(The sequence listing continues in the following parts.)

1. A nucleic acid for use in DNA assembly, wherein the nucleic acid comprises at least one methylation-protectable restriction element, the methylation-protectable restriction element comprising:
a type IIS restriction enzyme recognition sequence; and
a DNA methylase recognition sequence,
wherein the type IIS restriction enzyme recognition sequence and the DNA methylase recognition sequence overlap such that the base modified by the DNA methylase lies within the type IIS restriction enzyme recognition sequence,
wherein the DNA methylase recognition sequence is not identical to or enclosed by the type IIS restriction enzyme recognition sequence, and
wherein the DNA methylase recognition sequence does not overlap with the sequence that would form the overhang end sequence generated by the type IIS restriction enzyme
wherein the nucleic acid further comprises an opposing type IS restriction enzyme recognition sequence provided on the opposing side of the cut site of the methylation-protectable restriction element thereby forming a truncated composite element,
wherein the opposing type IIS restriction enzyme recognition sequence of the truncating composite element is arranged to direct the type IIS restriction enzyme to cut the nucleic acid at a site that is within the recognition sequence of the type IIS restriction enzyme recognition sequence of the methylation-protectable restriction element, and/or within the nucleotides between the cut site and the recognition sequence of the type IIS restriction enzyme recognition sequence of the methylation-protectable restriction element.

2. (canceled)

3. The nucleic acid according to claim 1, wherein the nucleic acid comprises first and second methylation-protectable restriction elements wherein the, the first and second methylation-protectable restriction elements each comprise:
a type IIS restriction enzyme recognition sequence; and
a DNA methylase recognition sequence,
wherein the type IIS restriction enzyme recognition sequence and the DNA methylase recognition sequence overlap such that the base modified by the DNA methylase lies within the type IIS restriction enzyme recognition sequence,
wherein the DNA methylase recognition sequence is not identical to or enclosed by the type IIS restriction enzyme recognition sequence, and
wherein the DNA methylase recognition sequence does not overlap with the sequence that would form the overhang end sequence generated by the type IIS restriction enzyme,
wherein the nucleic acid further comprises an opposing type IIS restriction enzyme recognition sequences provided on the opposing side of the cut site of each of the first and second methylation-protectable restriction elements form:
A i) a maintained composite element or an insertional composite element, and ii) a truncated composite element; or
B) two truncated composite elements,
wherein the maintained composite element is an arrangement wherein the opposing type IIS restriction enzyme recognition sequence is arranged to direct the type IIS restriction enzyme to cut the nucleic acid at the same site as the type IIS restriction enzyme recognition sequence of the opposing methylation-protectable restriction element, such that the same overhang is produced,
wherein the insertional composite element is an arrangement comprising a functional sequence insert provided between the methylation-protectable restriction element and the opposing type IIS restriction enzyme recognition sequence, and
wherein the truncated composite element is an arrangement wherein the opposing type IS restriction enzyme recognition sequence of the truncating composite element is arranged to direct the type IIS restriction enzyme to cut the nucleic acid at a site that is within the recognition sequence of the type IIS restriction enzyme recognition sequence of the methylation-protectable restriction element, and/or within the nucleotides between the cut site and the recognition sequence of the type IIS restriction enzyme recognition sequence of the methylation-protectable restriction element.

4. The nucleic acid according to claim 3, wherein the nucleic acid comprises nucleic acid sequence between the cut sites of the two methylation-protectable restriction elements, which is a discard sequence; or
wherein the nucleic acid is linearized vector having a methylation-protectable restriction element at each end.

5-8. (canceled)

9. The nucleic acid according to claim 1, wherein the type IIS restriction enzyme recognition sequence of the methylation-protectable restriction element is recognized by the same type IIS restriction enzyme species as the opposing type IIS restriction enzyme recognition sequence.

10. (canceled)

11. The nucleic acid according to claim 1, wherein the nucleic acid further comprises a second methylation-protectable restriction element and an opposing type IIS restriction enzyme recognition sequence thereby forming a maintained composite element, wherein the opposing type IIS restriction enzyme recognition sequence is arranged to direct the type IIS restriction enzyme to cut the nucleic acid at the same site as the type IIS restriction enzyme recognition sequence of the methylation-protectable restriction element, such that the same overhang/sticky end would be produced.

12-14. (canceled)

15. The nucleic acid according to claim 1, wherein the nucleic acid further comprises a second methylation-protectable restriction element and an opposing type IIS restriction enzyme recognition sequence thereby forming an insertional composite element, wherein a functional sequence insert is provided between the methylation-protectable restriction element and the opposing type IIS restriction enzyme recognition sequence.

16. (canceled)

17. The nucleic acid according to claim 1,
wherein the nucleic acid comprises two truncating composite elements with a discard sequence therebetween, or a linearized version thereof with the discard sequence cut out.

18-19. (canceled)

20. The nucleic acid according to claim 2, wherein the DNA methylase recognition sequences of each methylation-protectable restriction element is recognised by the same methylase.

21. (canceled)

22. The nucleic acid according to claim 1, wherein the methylation-protectable restriction element comprises or consists of a sequence according to any one of the overlapping methylation/restriction sites identified in Table 3 herein.

23. The nucleic acid according to claim 1, wherein the methylation-protectable restriction element comprises or consists of the sequence GACNNGGTCTCNNNNN (BsaI/M.Osp807II—SEQ ID NO: 1) or GAAGACGCNNNNNN (BpiI/M2.NmeMC58II—SEQ ID NO: 2) or GAAGCTCTTCNNNN (LguI/M.XmnI—SEQ ID NO: 3).

24. The nucleic acid according to claim 1, wherein the methylation-protectable and/or opposing type IIS restriction enzyme recognition sequence comprises or consists of a sequence according to any one of the type IIS restriction enzyme recognition sequences identified in Table 3 herein.

25. The nucleic acid according to claim 1, wherein the methylation-protectable and/or opposing type IIS restriction enzyme recognition sequence comprises or consists of the sequence GGTCTC (BsaI—SEQ ID NO: 4) or GAAGAC (BpiI—SEQ ID NO: 5) or GCTCTTC (LguI—SEQ ID NO: 6).

26. (canceled)

27. The nucleic acid according to claim 1, wherein the DNA methylase recognition sequence comprises or consists of the sequence GACNNNGTC (M.Osp807II—SEQ ID NO: 7) or GACGC (M2.NmeMC58II—SEQ ID NO: 8) or (M.XmnI—SEQ ID NO: 9).

28-43. (canceled)

44. A method of scarless DNA assembly of DNA fragments comprising the steps of:
(A) providing a first linearised methylated nucleic acid by restriction enzyme cutting of a first nucleic acid,
wherein the first nucleic acid comprises first and second methylation-protectable restriction elements with a discard sequence therebetween, or providing a previously restriction enzyme cut version thereof that has the discard sequence excised,
wherein the first and second methylation-protectable restriction elements of the first nucleic acid each comprise:
a type IIS restriction enzyme recognition sequence; and
a DNA methylase recognition sequence,
wherein the type IIS restriction enzyme recognition sequence and the DNA methylase recognition sequence overlap such that the base modified by the DNA methylase lies within the type IIS restriction enzyme recognition sequence,
wherein the DNA methylase recognition sequence is not identical to or enclosed by the type IIS restriction enzyme recognition sequence, and
wherein the DNA methylase recognition sequence does not overlap with the sequence that would form the overhang end sequence generated by the type IIS restriction enzyme, and
wherein the first and second methylation-protectable restriction elements are methylated with the DNA methylase that recognises the DNA methylase recognition sequence; and
wherein the first nucleic acid further comprises opposing type IS restriction enzyme recognition sequences provided on the opposing side of the cut site of each of the first and second methylation-protectable restriction elements to provide i) a maintained composite element and ii) a truncated composite element,
wherein the maintained composite element is an arrangement wherein the opposing type IIS restriction enzyme recognition sequence is arranged to direct the type IIS restriction enzyme to cut the nucleic acid at the same site as the type IIS restriction enzyme recognition sequence of the opposing methylation-protectable restriction element, such that the same overhang is produced, and
wherein the truncating composite element is an arrangement wherein the opposing type IIS restriction enzyme recognition sequence of the truncating composite element is arranged to direct the type IIS restriction enzyme to cut the nucleic acid at a site that is within the recognition sequence of the type IIS restriction enzyme recognition sequence of the methylation-protectable restriction element, or within the nucleotides between the cut site and the recognition sequence of the type IIS restriction enzyme recognition sequence of the methylation-protectable restriction element;
wherein the first nucleic acid is restriction enzyme cut by a type IIS restriction enzyme that recognizes the opposing type IIS restriction enzyme recognition sequences thereby forming the first linearised methylated nucleic acid;
and wherein the maintained and truncating composite elements are methylated with the DNA methylase;
providing a first DNA fragment for assembly having overhang ends that are adapted to ligate to the overhang ends of the first linearised methylated nucleic acid;
ligating the first DNA fragment for assembly and first linearised methylated nucleic acid with a ligase to form a first methylated intermediate vector;
transforming the first methylated intermediate vector into a bacterial strain that does not express the DNA methylase(s) that recognises either of the DNA methylase recognition sequence(s) of the maintained and truncating composite elements, thereby forming a first intermediate vector that is not methylated;
isolating the first intermediate vector;
(B) providing a second linearised methylated nucleic acid by restriction enzyme cutting of a second nucleic acid,
wherein the second nucleic acid comprises first and second methylation-protectable restriction elements with a discard sequence therebetween, or providing a previously restriction enzyme cut version thereof that has the discard sequence excised,
wherein the first and second methylation-protectable restriction elements of the second nucleic acid each comprise:
a type IIS restriction enzyme recognition sequence; and
a DNA methylase recognition sequence,
wherein the type IIS restriction enzyme recognition sequence and the DNA methylase recognition sequence overlap such that the base modified by the DNA methylase lies within the type IIS restriction enzyme recognition sequence,
wherein the DNA methylase recognition sequence is not identical to or enclosed by the type IIS restriction enzyme recognition sequence, and
wherein the DNA methylase recognition sequence does not overlap with the sequence that would form the overhang end sequence generated by the type IIS restriction enzyme, and
wherein the first and second methylation-protectable restriction elements are methylated with the DNA methylase that recognises the DNA methylase recognition sequence; and
wherein the second nucleic acid further comprises opposing type IIS restriction enzyme recognition sequences provided on the opposing side of the cut site of each of the first and second methylation-protectable restriction elements to provide i) a maintained composite element and ii) a truncated composite element,
wherein the maintained composite element is an arrangement wherein the opposing type IIS restriction enzyme recognition sequence is arranged to direct the type IIS restriction enzyme to cut the nucleic acid at the same site as the type IIS restriction enzyme recognition sequence of the opposing methylation-protectable restriction element, such that the same overhang is produced, and
wherein the truncating composite element is an arrangement wherein the opposing type IIS restriction enzyme recognition sequence of the truncating composite element is arranged to direct the type IIS restriction enzyme to cut the nucleic acid at a site that is within the recognition sequence of the type IIS restriction enzyme recognition sequence of the methylation-protectable restriction element, and/or within the nucleotides between the cut site and the recognition sequence of the type IIS restriction enzyme recognition sequence of the methylation-protectable restriction element:
wherein the second nucleic acid is restriction enzyme cut by a type IIS restriction enzyme that recognizes the opposing type IIS restriction enzyme recognition sequences thereby forming the second linearised methylated nucleic acid;
and wherein the maintained and truncating composite elements are methylated with the DNA methylase, and wherein the overhang provided by the maintained composite element of the first linearised methylated nucleic acid is different in sequence to the overhang provided by the methylation-protectable restriction element of the second linearised methylated nucleic acid;
providing a second DNA fragment for assembly having overhang ends that are adapted to ligate to the overhang ends of the second linearised methylated nucleic acid;
ligating the second DNA fragment for assembly and second linearised methylated nucleic acid with a ligase to form a second methylated intermediate vector;
transforming the second methylated intermediate vector into a bacterial strain that does not express the DNA methylase(s) that recognises either of the DNA methylase recognition sequence(s) of the maintained and truncating composite elements, thereby forming a second intermediate vector that is not methylated;
isolating the second intermediate vector;
(C) cutting the first intermediate vector with a type IIS restriction enzyme that recognises the type IIS restriction enzyme recognition sequence of the maintained composite element and a type IIS restriction enzyme that recognises the type IIS restriction enzyme recognition sequence of the truncating composite element, thereby forming a first adapted DNA fragment insert that comprises a maintained-overhang sequence that is determined by the maintained composite element and an opposing native-overhang sequence that is determined by the native sequence of the first DNA fragment for assembly;
(D) cutting the second intermediate vector with a type IIS restriction enzyme that recognises the type IIS restriction enzyme recognition sequence of the maintained composite element and a type IIS restriction enzyme that recognises the type IIS restriction enzyme recognition sequence of the truncating composite element, thereby forming a second adapted DNA fragment insert that comprises a maintained-overhang sequence that is determined by the maintained composite element and an opposing native-overhang sequence that is determined by the native sequence of the second DNA fragment for assembly;
wherein
(i) the first and second adapted DNA fragments are end fragments wherein their native-overhang sequences are complementary, such that they are arranged to ligate together; or
(ii) one or more middle DNA fragments for assembly are provided wherein the first and second adapted DNA fragments are respective end fragments in the assembly, and the one or more middle DNA fragments are arranged to be ligated between the first and second adapted DNA fragments via complementary native-overhang sequences;
further comprising the step of ligating together, with a ligase, the first and second adapted DNA fragments, or the first and second adapted DNA fragments and one or more middle DNA fragments, to form an assembled DNA fragment having maintained-overhangs at each end.

45-46. (canceled)

47. The method according to claim 44, wherein the middle DNA fragment comprises a first native-overhang sequence that is complementary to the native-overhang of the first adapted DNA fragment and a second native-overhang sequence that is complementary to the native-overhang of the second adapted DNA fragment.

48. The method according to claim 44, wherein the method comprises two or more middle DNA fragments for assembly, the middle DNA fragments comprise native-overhang sequences that are complementary to the native-overhang of a neighbouring middle DNA fragment, such that they can be ligated together in a pre-determined order; and wherein the first and last middle DNA fragments in the sequence are arranged to ligate to the respective first adapted DNA fragment and second adapted DNA fragment via complementary native-overhang sequences.

49. The method according to claim 44, wherein a middle DNA fragment for assembly is provided by providing a further linearised methylated nucleic acid
by restriction enzyme cutting of a nucleic acid, wherein the nucleic acid comprises first and second methylation-protectable restriction elements with a discard sequence therebetween, or providing a previously restriction enzyme cut version thereof that has the discard sequence excised,
wherein the first and second methylation-protectable restriction elements of the nucleci acid each comprise:
a type IIS restriction enzyme recognition sequence; and
a DNA methylase recognition sequence,
wherein the type IIS restriction enzyme recognition sequence and the DNA methylase recognition sequence overlap such that the base modified by the DNA methylase lies within the type IIS restriction enzyme recognition sequence,
wherein the DNA methylase recognition sequence is not identical to or enclosed by the type IIS restriction enzyme recognition sequence, and
wherein the DNA methylase recognition sequence does not overlap with the sequence that would form the overhang end sequence generated by the type IIS restriction enzyme, and
wherein the first and second methylation-protectable restriction elements are methylated with the DNA methylase that recognises the DNA methylase recognition sequence; and
wherein the nucleic acid further comprises opposing type IIS restriction enzyme recognition sequences provided on the opposing side of the cut site of each of the first and second methylation-protectable restriction elements to provide two truncated composite elements,
wherein the truncating composite element is an arrangement wherein the opposing type IIS restriction enzyme recognition sequence of the truncating composite element is arranged to direct the type IIS restriction enzyme to cut the nucleic acid at a site that is within the recognition sequence of the type IIS restriction enzyme recognition sequence of the methylation-protectable restriction element, and/or within the nucleotides between the cut site and the recognition sequence of the type IIS restriction enzyme recognition sequence of the methylation-protectable restriction element;
wherein the nucleic acid is restriction enzyme cut by a type IIS restriction enzyme that recognizes the opposing type IS restriction enzyme recognition sequences thereby forming the further linearised methylated nucleic acid;
providing an adapted middle DNA fragment for assembly having overhang ends that are adapted to ligate to the overhang ends of the further linearised methylated nucleic acid;
ligating the adapted middle DNA fragment for assembly and further linearised methylated nucleic acid with a ligase to form a methylated intermediate vector;
transforming the methylated intermediate vector into a bacterial strain that does not express the DNA methylase(s) that recognises either of the DNA methylase recognition sequence(s) of the methylation-protectable restriction elements, thereby forming an intermediate vector that is not methylated;
isolating the intermediate vector;
cutting the intermediate vector with restriction enzymes that recognise the restriction enzyme recognition sequence of the methylation-protectable restriction elements, thereby forming a middle DNA fragment insert that comprises native-overhang sequences at each end that are determined by the native sequence of the middle DNA fragment for assembly.

50-51. (canceled)

52. The method according to claim 44, further comprise the step of providing a linearised destination vector for insertion of the assembled DNA fragments.

53. The method according to claim 52, wherein the linearised destination vector is provided by cutting a circular destination vector with the restriction enzyme(s) that recognise the type IIS restriction enzyme recognition sequences of the maintained and/or truncating composite element.

54-56. (canceled)

57. A kit comprising one or more nucleic acids according to claim 1.

58. The kit according to claim 56, further comprising a restriction enzyme and/or a ligase, such as T4 DNA ligase.

59. A host cell comprising nucleic acid according to claim 1.

60. (canceled)
